(19) United States
(12) Patent Application Publication
(10) Pub. No.: US 2007/0092871 A1
(43) Pub. Date: Apr. 26, 2007

(54) Microarray for pathogen identification

(75) Inventors: Michael J. Lodes, Seattle, WA (US); Dominic Suciu, Edmonds, WA (US)

Correspondence Address: COMBIMATRIX CORPORATION, 6500 HARBOUR HEIGHTS PARKWAY, MUKILTEO, WA, 98275, US

(73) Assignee: CombiMatrix Corporation

(21) Appl. No.: 11/584,379

(22) Filed: Oct. 20, 2006

Related U.S. Application Data
(60) Provisional application No. 60/728,641, filed on Oct. 20, 2005.

(51) Int. Cl. C12Q 1/70; C12Q 1/68; C12M 3/00

(52) U.S. Cl. 435/5; 435/6; 435/287.2; 977/924

(57) ABSTRACT

There is disclosed a microarray device for pathogen identification and for subtyping influenza A. Pools of primers are disclosed and used to amplify any subtype of influenza A. Pathogen identification includes influenza A, influenza B, parainfluenza virus, adenovirus, enterovirus, rhinovirus, human metapneumovirus, respiratory syncytal virus, herpes simplex viruses, SARS coronavirus, Epstein-Barr virus, human herpes virus, pan bacteria, Chlamydia, Mycoplasma, streptococcus, Bacillus anthracis, Streptococcuspyogenes, Mycoplasmapneumoniae, Chlamydiapneumoniae, Bacillus thuringiensis, Bacillus subtilis, Bacillus cereus, and B. anthracis. The probes are preferably selected from the first 500 nt of a gene from the 5′ end. The primers are preferably selected from bases in the 500 to 600 nt range from the 5′ end.

### STATEMENT REGARDING FEDERALLY SPONSORED RESEARCH

[0001] A portion of this invention was sponsored by Department of Defense Contract No. W911SR-04-C-0022.

### STATEMENT FOR A SEQUENCE LISTING

[0002] This application for patent incorporates by reference the accompanying compact disc (CD) having the title “1100 Sequence Listing.” The aforementioned CD has one file that has the title “1100.ST25.txt,” and has a size of 983 KB.

### TECHNICAL FIELD

[0003] Disclosed herein are microarrays for identifying pathogens. Specifically, provided herein are primers for pathogen amplification and oligonucleotide-containing microarrays having a plurality of probes for hybridization of pathogen targets. Using the primers and probes, an array is provided to determine whether an identified pathogen is present in a sample.

### BACKGROUND

[0004] Rapid and accurate detection and identification of pathogens has important applications in numerous fields including medicine, veterinary medicine, biology, and agriculture as well as within the military. For example, medical diagnosis of bacterial or viral infection requires identification of specific pathogens within clinical specimens followed by making a rational connection between the identified pathogen and the clinical syndrome. Similarly, diagnosis of a military biological agent or a clinical syndrome of military personnel requires identification of specific pathogens.

[0005] Current methods of pathogen diagnosis are often too long in duration (one or more days) and can be based on clinical symptoms, simple microscopic examination of tissue, immunological techniques such as immuno-fluorescense, immunoperoxidasae, ELISA, conventional culture, semiquantitative antigenemia assay, serological diagnosis, and PCR. Compared to other diagnosis methods, PCR provides increased detection sensitivity and can provide detection of several viruses in parallel. Parallel detection for discrete viruses can be accomplished by multiplexing specific primers, and parallel detection for members of a class can be accomplished through design of degenerate primers. However, PCR methods are not able to detect a wide variety of pathogens and pathogen subtypes in a single assay because designing multiplex primers for each pathogen or pathogen subtype is difficult and may be nearly impossible for rapidly mutating pathogens. Additionally, subtype identification may require additional lengthy and labor-intensive procedures such as sequencing, restriction enzyme analysis, and hybridization blotting. In general, current methods of diagnosis are relatively time consuming, labor-intensive and lengthy and are not capable of providing a high degree of accuracy in correct identification of specific pathogen or pathogen subtypes.

[0006] The common virus influenza A illustrates the problem of rapid mutation viral pathogen leading to difficulty in subtype identification, which can be of critical importance in diagnosis of a potentially epidemic or pandemic viral subtype, such as what has recently been termed “bird flu.” Influenza A virus is a negative strand RNA virus with a segmented genome that can infect a broad range of animals including man, horses, pigs, ferrets and various avian species. Identification of a virus subtype is typically by serological or molecular identification of the subtype of viral hemagglutinin (HA) and neuraminidase (NA) genes. Viruses with any combination of the 16 HA (Fouchier et al., J. Virol., 79:2814-2822, 2005) and 9 NA subtypes can infect aquatic birds while few subtypes have been found to infect humans. However, interspecies transmission can occur after recombination or mixing of subtypes in birds or pigs (Lipatov et al., J. Virol., 78:8951-8959, 2004; Scholtissek et al., Virology, 147:287-294, 1985; and Hoffmann et al., Arch. Virol., 146:1-15, 2001). In addition, new human strains of virus can arise by reassortment or antigenic shifts when two or more subtypes are circulating in the human population (Mizuta et al., Microbiol. Immunol., 47:359-361, 2003; Webby and Webster, Phil. Trans. R. Soc. London, B356:1815-1826, 2001). Re-emergence of a subtype into the human population can also occur by antigenic drift (Webby and Webster, Phil. Trans. R. Soc. London, B356:1815-1826, 2001), which occurs when genetic mutations of the HA and NA genes, from polymerase infidelity, creates virons that escape immune surveillance. For example, variability of the H3N2 subtype has required 19 changes in a vaccine component over 29 years (Hay et al., Phil. Trans. R. Soc. Lond. B356:1861-1870, 2001). New antigenic variants that require revisions in vaccine components can arise with a frequency of one per 1 to 2 years. Therefore, there is a need for diagnostic assays that are sensitive, specific as to serotype, and accurate. Additional benefits of less a labor-intensive and rapid test would be bonuses.

[0007] Identification of influenza subtypes is accomplished with viral detection (cell culture) and serological techniques such as complement fixation, hemagglutination, hemagglutination inhibition assays, and immunofluorescence methods (Allwinn et al., Med. Microbiol. Immunol., 191:157-160, 2002; Amano and Cheng, Anal. Bioanal Chem., 381:156-184, 2005; Palmer et al., Immunology Series No. 6. U.S. Dept. of Health, Education, and Welfare, p. 51-52, 1975; and Ueda et al., J. Clin. Microbiol. 36:340-344, 1998). However, even though traditional methods are generally effective, they involve the use of labor-intensive techniques and highly trained personnel. Because of their speed, specificity, and sensitivity, genomic assays are becoming more common for identifying the genotype of an unknown specimen (Taubenberger and Layne, Mol. Diagn., 6:291-305, 2001; Ellis and Zambon, Rev. Med. Virol., 12:375-389, 2002; and Zou, J. Clin. Microbiol. 35:2623-2627, 1997). Molecular methods also complement antigenic characterization in certain cases where antigenic tests are not specific enough to detect closely related groups (Schweiger et al., Med. Microbiol. Immunol., 191:133-138, 2002). Reverse transcription-polymerase chain reaction (RT-PCR) is used for virus identification (Hoffmann et al., Arch. Virol., 146:1-15, 2001; Adeyefa et al., Virus Res., 32:391-399, 1994; and Templeton et al., J. Clin. Microbiol., 42:1564-1569, 2004). However, a positive amplification can be verified only by subsequent assays to elaborate sequence information. By overcoming this limitation, microarrays and biosensors have become tools for viral discovery, detection and genotyping (Kessler et al., J. Clin. Microbiol., 42:2173-2185, 2004; Ivshina et al., J. Clin. Microbiol., 42:5793-5801, 2004; Sengupta et al., J. Clin. Microbiol., 41:4542-4550, 2003; Li et al., J. Clin. Microbiol., 39:696-704, 2001; Amano and Cheng, Anal. Bioanal. Chem., 381:156-184, 2005; Ellis and Zambon, Rev. Med. Virol., 12:375-389, 2002; and Wang et al., Proc. Biology, 1:257-260, 2003; Wang et al., Proc. Natl. Acad. Sci. USA, 99:15687-15692, 2002).

[0008] Unique oligonucleotide probe sequences are required to utilize the potential benefits of microarray-based assay of pathogens and subtypes of pathogens. Additionally, unique primer pools are required in order to amplify a target sample for a microarray-based assay. Unique subtypes of influenza A are of high interest because of the potential for a pandemic. Thus, there is a need in the art for oligonucleotide probes and primer pools capable of being used to amplify, detect, and distinguish a broad spectrum of pathogens and pathogen subtypes. The devices and methods disclosed herein address this need.

[0009] In the face of concerns over an influenza pandemic, identification of virulent influenza isolates must be obtained quickly for effective responses. Knowledge of the exact strain, origin of the strain, and probable characteristics of the virus are critical for surveillance of a disease outbreak and preventing the spread of the disease. Rapid subtype identification of flu is not always straightforward. Simple serological tests on infected individuals are awkward to administer and are an ineffective tool for monitoring viruses undergoing a high rate of mutation or rapid recombination. RT-PCR assays have better sensitivity but are problematic in scenarios where new strains of virus emerge or mixtures of viruses exist. RNA viruses such as flu undergo antigenic shift and genetic drift as they circulate through populations. Tracking these changes and keeping abreast of evolving viral variants is the key to effective vaccination and can provide insight as to why certain strains of flu are drug resistant or more lethal to infected hosts. In addition, influenza isolates circulating in non-human populations (e.g. birds, pigs, and dogs) must also be monitored on an ongoing worldwide basis to detect virulent isolates that have the potential to infect humans directly or recombine with common human strains of flu to produce lethal hybrids. In many situations, the identification of the circulating subtype (e.g. by simple serotype or a simple RT-PCR test) is not sufficient, and specific knowledge of the genetic makeup of the virus is required. For example, the avian H5N1 virus has significant potential for further recombination with common human strains (e.g. H3N2) or other non-human strains common in avian populations (H7 and H9 strains). The H5N1 subtype is also difficult to identify because of the lack of sensitivity and specificity of many of the commercial tests. In addition, genotype Z, the dominant H5N1 virus genotype circulating in Vietnam and Thailand contains a mutation that is associated with resistance to amantadine and rimantadine. Because of the high susceptibility in humans and resistance to antibiotics of this isolate, neuraminidase inhibitors must be given within 48 hours of onset of illness to be effective. Thus rapid and specific identification of this subtype and accurate sequence information is crucial for proper treatment.

### SUMMARY

[0010] Disclosed herein are microarrays for genetic identification of upper respiratory pathogens comprising: a microarray device having a plurality of oligonucleotide probe sequences, wherein the oligonucleotide probe sequences correspond to at least five unique genes and distinct sequence regions of pathogen genomes selected from the group consisting of influenza A (SEQ ID NO:1-11, 251-261, 495-505, 726-736), influenza B (SEQ ID NO:12-35, 262-285, 506-525, 737-758), parainfluenza virus (SEQ ID NO:36-70, 286-315, 526-560, 759-792), adenovirus (SEQ ID NO:71-95, 316-341, 561-582, 793-818), enterovirus (SEQ ID NO:96-121, 342-368, 583-604, 819-842), rhinovirus (SEQ ID NO:122-138, 369-385, 605-621, 843-859), human metapneumovirus (SEQ ID NO:139-141, 386-388, 622-624, 860-862), respiratory syncytal virus (SEQ ID NO:142-177, 389-425, 625-657, 863-896), herpes simplex viruses (SEQ ID NO:178-184, 426-431, 658-665, 897-905), SARS coronavirus (SEQ ID NO:185-202, 432-448, 666-682, 906-924), Epstein-Barr virus (SEQ ID NO:203-204, 449, 925-927), human herpes virus (SEQ ID NO:205-206,450-451, 863, 928-929), pan bacteria (SEQ ID NO:207-210, 452-454, 684-687, 930-933), Chlamydia (SEQ ID NO:211-226, 455-470, 688-701, 934-949), Mycoplasma (SEQ ID NO:227-238,471-482, 702-713, 950-962), streptococcus (SEQ ID NO:239-244, 483-488, 714-719, 963-968), Bacillus anthracis (SEQ ID NO:245-250, 489-494, 720-725, 969-97), Streptococcuspyogenes (SEQ ID NO:975-1013), Mycoplasmapneumoniae (SEQ ID NO:1014-1051), Chlamydiapneumoniae (SEQ ID NO:1052-1083), Bacillus thuringiensis (SEQ ID NO:1084-1115), Bacillus subtilis (SEQ ID NO:1116-1154), Bacillus cereus (SEQ ID NO:1155-1157), and B. anthracis (SEQ ID NO:1158-1173), and combinations thereof.

[0011] Preferably, the oligonucleotide probe sequences are selected in a range from 400 to 800 bases on each gene of each pathogen. More preferably, the oligonucleotide probe sequences are selected in a range from 400 to 800 bases on a gene of each pathogen at a 5′ end.

[0012] Also disclosed herein is a microarray for subtyping influenza A comprising: a solid surface having a plurality of known oligonucleotide probe sequences, wherein the oligonucleotide probes correspond to at least five subtypes of influenza A selected from the group consisting of H1 (SEQ ID NO:1174-1573), H2 (SEQ ID NO:1574-1973), H3 (SEQ ID NO:1975-2373), H4 (SEQ ID NO:2374-2573), H5 (SEQ ID NO:2574-2973), H6 (SEQ ID NO:2974-3369), H7 (SEQ ID NO:3370-3769), H8 (SEQ ID NO:3770-3887), H9 (SEQ ID NO:3888-4287), H10 (SEQ ID NO:4288-4390), H11 (SEQ ID NO:4391-4486), H12 (SEQ ID NO:4487-4587), H13 (SEQ ID NO:4588-4705), H14 (SEQ ID NO:4706-4761), H15 (SEQ ID NO:4762-4807), N1 (SEQ ID NO:4808-5207), N2 (SEQ ID NO:5208-5607), N3 (SEQ ID NO:5608-5878), N4 (SEQ ID NO:5879-5920), N5 (SEQ ID NO:5921-5995), N6 (SEQ ID NO:5996-6116), N7 (SEQ ID NO:6117-6216), N8 (SEQ ID NO:6217-6561), and N9 (SEQ ID NO:6562-6661) and combinations thereof.

[0013] Preferably, the oligonucleotide probes are selected in a range from 400 to 800 bases on a gene of each pathogen. More preferably, the oligonucleotide probes are selected in a range from 400 to 800 bases on a gene of each pathogen at a 5′ end.

[0014] Further still, the present invention provides a pool of primers for amplifying influenza A comprising a primer set selected from the group consisting of SEQ ID NO:6662-6699 and combinations thereof. Preferably, the primer set is selected in a range from 50 to 200 bases of HA and NA genes. More preferably, the primer set is selected in a range from 450 to 700 bases from a 5′ end of HA and NA genes.

[0015] Further still, the present invention provides a pool of primers for amplifying influenza A comprising a primer set selected from the group consisting of SEQ ID NO:6700-6731 and combinations thereof. Preferably, the primer set is selected in a range from a 50 to 200 bases of HA and NA genes. More preferably, the primer set is selected in a range from 450 to 700 bases from a 5′ end of HA and NA genes.

### BRIEF DESCRIPTION OF THE DRAWINGS

[0016] FIG. 1 shows an image of gels taken on PCR samples after amplification of known influenza A subtypes using reverse primer pools. Four pools of reverse primers were used: HA-universal (U), NA-universal (U), HA-degenerate (D), and NA-degenerate (D). Arrowheads indicate the approximate range of the sizes predicted for the amplicons.

[0017] FIG. 2 shows an image of gels taken on PCR samples after amplification of unknown influenza A subtypes using reverse primer pools. Four pools of reverse primers were used: HA-universal (U), NA-universal (U), HA-degenerate (D), and NA-degenerate (D). Arrowheads indicate the approximate range of the sizes predicted for the amplicons.

[0018] FIG. 3 shows an image of gels taken on PCR samples after amplification using literature primers. Amplification was performed on full-length hemagglutinin (HA) and neuraminidase (NA) (1700 bp and 1400 bp respectively) with published universal influenza A (InA) primers.

[0019] FIG. 4 shows the results of hybridization of an H1N1 influenza A sample to a microarray having probes for pathogens.

[0020] FIG. 5 shows the results of hybridization of an influenza B sample to a microarray having probes for pathogens.

[0021] FIG. 6 shows plots of influenza A subtype identification of the HA gene.

[0022] FIG. 7 show plots of influenza A subtype identification of the NA gene.

### DETAILED DESCRIPTION

[0023] Microarray preparation methods for making oligonucleotide probes for pathogen identification include the following: (1) spotting a solution on a prepared surface using spotting robots; (2) in situ synthesis by printing reagents via ink jet or other computer printing technology and using phosphoramidite chemistry; (3) in situ parallel synthesis using electrochemically generated acid for removal of protecting groups and using standard phosphoramidite chemistry; (4) in situ synthesis using maskless photo-generated acid for removal of protecting groups and using regular phosphoramidite chemistry; (5) mask-directed in situ parallel synthesis using photo-cleavage of photolabile protecting groups (PLPG) and phosphoramidite chemistry; (6) maskless in situ parallel synthesis using PLPG and digital photolithography and standard phosphoramidite chemistry; and (7) electric field attraction/repulsion for depositing fully formed oligonucleotides onto known locations.

[0024] An electrode microarray for in situ oligo synthesis using electrochemical deblocking is disclosed in Montgomery U.S. Pat. Nos. 6,093,302; 6,280,595, and 6,444,111 (Montgomery I, II, and III respectively), all of which are incorporated by reference herein. Another and materially different electrode array (not a microarray) for in situ oligo synthesis on surfaces separate and apart from electrodes using electrochemical deblocking is disclosed in Southern U.S. Pat. No. 5,667,667, which is incorporated by reference herein. Photolithographic techniques for in situ oligo synthesis are disclosed in Fodor et al. U.S. Pat. No. 5,445,934 and the additional patents claiming priority thereto, all of which are incorporated by reference herein. Electric field attraction/repulsion microarrays are disclosed in Hollis et al. U.S. Pat. No. 5,653,939 and Heller et al. U.S. Pat. No. 5,929,208, both of which are incorporated by reference herein. A review of oligo microarray synthesis is provided by: Gao et al., Biopolymers 2004, 73:579.

[0025] One method making primers for amplifying pathogens in a sample for pathogen identification is standard phosphoramidite synthesis on beads in a column. Primers are a collection of oligonucleotides synthesized by standard means and often can be ordered through various commercial sources.

[0026] The oligonucleotide probe designs and primer sequence designs isolate the most distinct sequence regions of the genome of the selected list of pathogens and their various strains. This approach to design provides the optimal sequences to enable a microarray diagnostic device that can identify and distinguish pathogens in a sample and distinguish strains of the pathogens.

[0027] DNA microarray device is used to detect and accurately type flu strains (influenza) with hemeagglutinin subtypes 1 through 15 and neuraminidase subtypes 1 through 9 using a protocol that requires less than four hours start to finish. In addition to providing very high resolution genotype information on any given flu strain, the device can also provide information on novel strains of flu produced by rapid mutation or recombination between multiple strains of flu.

[0028] Reference, clinical, and military laboratories must evaluate antigenic shift and genetic drift in the common flu strains circulating each year so that these changes can be addressed in vaccine development. Also, avian influenza isolates must be monitored on a worldwide basis to detect virulent isolates that have the potential to infect humans and produce a future epidemic or pandemic. In many situations, the identification of the circulating subtype is not sufficient, and a specific gene sequence is required. For example, there is an increased risk for spread in the human population of the highly virulent avian H5N1 virus because of the combination of the large number of poultry farms, the potential for recombination with a human strain, and the high susceptibility to infection with this strain in the human population (Yuen and Wong, Hong Kong Med. J., 11:189-99, 2005; Chen et al., Proc Natl. Acad. Sci. USA 101:10452-10457, 2004). The H5N1 subtype is difficult to identify because of the lack of sensitivity and specificity of many of the commercial tests. In addition, genotype Z, the dominant H5N1 virus genotype that is circulating in Vietnam and Thailand, contains a mutation that is associated with resistance to amantadine and rimantadine (Yuen and Wong, Hong Kong Med. J., 11:189-99, 2005). Because of the high susceptibility in humans and resistance to antibiotics of this isolate, neurarninidase inhibitors must be given within 48 hours of onset of illness to be effective. Thus rapid and specific identification of this subtype and accurate sequence information is crucial for proper treatment.

[0029] While traditional assays for influenza detection and typing represent the current standard, these assays cannot meet the future needs of rapid, sensitive, specific, and simple methods. Herein is provided a specific influenza A microarray diagnostic device that contains specific probes for each of the 15 HA subtypes and 9 NA subtypes. Hybridizable target has been generated for all 15 HA and 9 NA subtypes by PCR amplification of influenza A reference strains. Non-overlapping probes with similar annealing stabilities were generated from the influenza sequence database, consisting of over 3000 HA and over 1000 NA sequences. Subtype-specific probes were then selected from a pool of over 23,000 HA and 15,000 NA sequences and then compared to the database to insure that each probe was unique.

[0030] HA and NA subtypes were correctly identified with this assay platform. Weak or average intensity profiles for some subtypes were due to dilution of positive signal by subtype probes that were not hybridized or weakly hybridized to the matching subtype target. By eliminating unnecessary or cross-reacting probes and limiting probe number to approximately 100 for each subtype, this artifact of the array can be corrected. A second approach is to subdivide the probes for each subtype into similar groupings and thus concentrate the positive probes; this approach increases the average signal for a positive identification. This approach also produces positive probe sequences that are tiled across the viral sequence of interest and results in an approximation or a best-fit sequence for the unknown subtype.

[0031] The inventive microarray diagnostic device presented here, was able to sequence approximately 500 or more nucleotides from the HA and NA genes from isolates that have been identified with the illustrative microarray using the same target preparation for both assays. The inventive microarrays contain either a consensus subtype sequence or a known subtype sequence that lacks a high degree of secondary structure.

[0032] Sequencing probes were tiled by one nucleotide across the sequence of interest, and for each nucleotide that was interrogated, four probes were designed that differed only at the 5′ end. After the enzymatic extension of a common labeled primer, only the perfect match probe sequence was ligated to the labeled primer. The resulting sequence was automatically extracted for database searches.

[0033] Influenza A HA subtypes 1 through 15 and NA subtypes 1 through 9 were rapidly and specifically identified and sequenced using the illustrated oligonucleotide microarrays with a protocol that required less than one hour for target hybridization. The inventive assay precluded the need for traditional target labeling systems and integrated an enzyme-based procedure that overcame many of the shortfalls of traditional thermal hybridizations such as optimal hybridization conditions and difficult mismatch detection (Sengupta et al., J. Clin. Microbiol. 41:4542-4550, 2003). However, the illustrated diagnostic microarray device can also be used with traditional microarray labeling, hybridization, and washing protocols.

[0034] The oligonucleotide sequencing probe sequence “content” on the diagnostic microarray device was based upon several criteria, including but not limited to, TM (melting temperature), length, and location in the pathogen target gene sequences; for example, the HA and NA gene sequences for different influenza strains. Published structural analysis and antigenic epitope mapping indicated that the HA receptor-binding structure and surface antigenic epitopes are located within the 5′ 720 bp (approx. bp 370 to 720) for subtype H9 and the 5′ 600 bp (approx. bp 180 to 610) for subtypes H3 and H5. The mapping of these sites was based on the selection of escape mutants with a panel of monoclonal antibodies (Kaverin et al., J. Gen Virol. 83:2497-2505, 2002; Kaverin et al., J. Virol. 78:240-249, 2004; and Gulati et al, J. Virol. 76:12274-12280, 2002).

[0035] The microarray device herein provided an ability for rapid identification of the HA and NA subtypes followed by sequence from critical regions of the HA and NA genes, such as surface antigenic epitopes, and significantly decreased the time and cost for the identification of potential lethal virus (upper respiratory virus) strains. The detection, identification, and sequencing of viral genomes in samples using oligonucleotide microarray technology is a viable rapid approach and can complement or supplant traditional methods.

### EXAMPLE 1

[0036] In this example, samples of influenza A were amplified using primers of the present invention and disclosed primers. The reverse primers of the present invention include pool #1 for amplifying subtype H1-H15 (SEQ ID NO:6662-6684), pool #2 for amplifying subtype N1-N9 (SEQ ID NO:6685-6699), pool #3 for amplifying subtype H1-H15 (SEQ ID NO:6700-6720), and pool #4 for amplifying subtype N1-N9 (SEQ ID NO:6721-6731). The primers were chosen from the 5′ 500 to 600 nucleotide region of the HA and NA genes. The forward primer for first stage cDNA was a universal primer having the following sequence: taatacgact cactatagga gcaaaagcag g (SEQ ID NO:6732). The tag of the sequence is underlined and is a T7 oligo, and the universal influenza sequence is shown in bold letters. The universal influenza sequence is complimentary to the 12 bp of the 5′ end of the HA and NA genes. The forward primer for second stage amplification was a T7 universal primer having the following sequence: gcatcctaat acgactcact atagg (SEQ ID NO:6733). The samples amplified by these primers were two H1N1 subtypes, an H2N2 subtype, and three unknown subtypes.

[0037] The primers used from the literature were for full-length amplification of the HA and NA genes. The universal forward primer sequence was aggagcaaaagcagg (SEQ ID NO:6734). The universal reverse primer sequence was ggagtagaaacaagg (SEQ ID NO:6735). The universal HA specific forward primer sequence was aggagcaaaagcagggg (SEQ ID NO:6736). The universal HA specific reverse primer sequence was agtagaaacaagggtgtttt (SEQ ID NO:6737). The universal NA specific forward primer sequence was aggagcaaaagcaggact (SEQ ID NO:6738). The universal NA specific reverse primer sequence was agtagaaacaaggagtttttt (SEQ ID NO:6739). Underlined bases are linker bases. Non-underlined bases are influenza A. The sample amplified by these primers was a H9N2 subtype.

[0038] For all samples amplified using primers, the following procedure was used. First-strand cDNA was produced from influenza virus RNA sample using SuperScript® II reverse transcriptase (Invitrogen Corporation) and the forward primer for the first stage cDNA. A solution was made comprising 3 μl of distilled water, 7 μl of viral RNA solution, 1 μl or primer, and 1 μl of dNTP solution. This solution was held at 70° C. for 5 minutes and then placed on ice. To this solution was added 4 μl of 5× first strand buffer, 2 μl of 0.1 molar DTT, 0.5 μl of RNAse inhibitor, and 0.5 μl of distilled water. The program for amplification was as follows: 40° C. for 2 minutes, addition of 0.5 μl of SuperScript® II, 40° C. for 48 minutes, 50° C. for 50 minutes, 70° C. for 15 minutes, and 4° C. until the next step.

[0039] For PCR amplification, the following solution was made for each primer set of the present invention: 67 μl of distilled water, 10 μl of 10× polymerase buffer, 10 μl of DMSO, 1 μl of Taq DNA polymerase, 3 μl of a 10 millimolar dNTP mix, 2 μl of a 10 micromolar T7 forward primer, 2 μl of a 10 micromolar specific reverse primer or in the case of unknown samples 2 μl of a pool of 100 μM of primers, and 5 μl of first-strand cDNA. The reaction conditions consisted of a 5 min denaturation at 94° C., followed by 40 cycles of a 30 sec, 94° C. denaturation step; a 30 sec, 55° C. annealing step; and a 30 sec, 72° C. extension; and finally a 10 min extension at 72° C. The resulting PCR product was cleaned with a Qiagen QIAquick nucleotide removal kit (#28306) and eluted in 100 μl of distilled water. A second, one-way amplification resulted in single stranded target. One-way amplifications were accomplished with 69 μl of distilled, deionized water, 10 μl of 10× polymerase buffer, 10 μl of DMSO, 1 μl of Taq DNA polymerase, 3 μl of a 10 μM dNTP mix, 2 μl of a 10 μM specific reverse primer and 5 μl of cleaned amplification product from amplification 1. The reaction conditions consisted of a 5 min denaturation at 94° C., followed by 50 cycles of a 30 sec, 94° C. denaturation, a 30 sec, 55° C. annealing, and a 30 sec, 72° C. extension; and finally a 10 min extension at 72° C. The resulting product was purified with a Qiagen QIAquick Nucleotide Removal kit and eluted in 100 μl of distilled water. This step resulted in tagged, single-stranded target for hybridization.

[0040] For all samples amplified using the literature primers, the following procedure was used. The following were added to a 0.2 ml tube: 2 microliters of RNA sample and 2 microliters of forward primers (10 mM). The tube was gently mixed. The tube was then heated to 70° C. for 5 minutes and then placed on ice. A solution was made comprising 8.8 microliters of distilled water, 4.0 microliters of 5× SSII buffer, 1 microliter of dNTP mix (10 mM each), 2 microliters of 100 mM DTT, and 0.2 microliters of SuperScript II RT (200 U/microliter). This solution was added to the tube and mixed gently. The heat cycle comprised: 42° C. for 10 minutes, 50° C. for 50 minutes, 70° C. for 15 minutes, and then held at 4° C.

[0041] For PCR amplification, the following solution was made for each of the literature primers: 67 microliters of distilled water, 10 microliters of 10× PCR buffer, 10 microliters of DMSO, 3 microliters of dNTP (10 mM each), 2 microliters of forward primer (10 micromolar), 2 microliters of reverse primer (10 micromolar), 5 microliters of RT template, and 1 microliter of Taq polymerase (added after other components were mixed and heated to 95° C.) The heat cycling was as follows: 1 cycle at 95° C. for 5 minutes; 40 cycles of 95° C. for 30 sec, 55° C. for 60 sec, and 72° C. for 2 min; 1 cycle at 72° C. for 10 min; and 1 cycle at 4° C. until ready for next step. The PCR products were purified using a Qiagen QIAquick Nucleotide Removal kit (#28306). Elution was done using 100 microliters of distilled water. Single-stranded DNA was isolated as follows: Streptavidin Magnetic Beads (NEB S1420S) were washed three times using 2× PBS. To 100 microliters of the cleaned PCR product, 24 microliters of 10× PBS was added and then mixed with the beads. The mixture was incubated for 15 min with frequent mixing. The mix was spun at 6000 RPM for 1 min and then washed two times with 2× PBS. The supernatant was removed and 20 microliters of 0.1 M NaOH was added. This solution was incubated for 10 minutes at room temperature. The solution was spun, and the supernatant was recovered. Another 20 microliters of 0.1 M NaOH was added followed by another 10 minute incubation. The solution was spun and supernatant recovered. To the combined supernatants, 20 microliters of 0.2 M HCl was added. Then, 6 microliters of 10× PBS was added, and the solution was mixed. The resulting solution was purified using a Qiagen QIAquick Nucleotide Removal kit (#28306). Elution was done using 100 microliters of distilled water.

[0042] The resulting PCR products were run on gel electrophoresis. Images of the gel are shown in FIGS. 1-3. FIG. 1 demonstrates that the reverse primer pools amplified the two H1N1 subtypes and the H3N2 subtype as evidenced by strong bands at the expected size range. Pool #1 (HA-U), Pool #2 (NA-U), Pool #3 (HA-D), and Pool #4 (NA-D) showed strong bands for each subtype. FIG. 2 shows that the reverse primer pools of the present invention amplified the three unknown samples. Each primer pool of the present invention showed strong bands. Pool #1 appeared to be the weakest of the pools for unknown 1 but still showed evidence of amplification. FIG. 3 demonstrates that the (non-inventive) reverse primers used from the literature for full strand amplification did not amplify the four different H9N2 subtypes adequately. The universal forward and reverse primers showed almost no amplification. The HA-specific primers showed some amplification, especially for sample 4. The NA-specific primers showed minimal amplification only for samples 1 and 4.

### EXAMPLE 2

[0043] In this example, a microarray was prepared having probes of the present invention to identify the following pathogens: pan influenza A, (SEQ ID NO:1-11, 251-261, 495-505, 726-736), p (subtypes H1-H15 and subtypes N1-N9), pan influenza B (SEQ ID NO:12-35, 262-285, 506-525, 737-758), parainfluenza virus (SEQ ID NO:36-70, 286-315, 526-560, 759-792), adenovirus (SEQ ID NO:71-95, 316-341, 561-582, 793-818), enterovirus (SEQ ID NO:96-121, 342-368, 583-604, 819-842), rhinovirus (SEQ ID NO:122-138, 369-385, 605-621, 843-859), human metapneumovirus (SEQ ID NO:139-141, 386-388, 622-624, 860-862), respiratory syncytal virus (SEQ ID NO:142-177, 389-425, 625-657, 863-896), herpes simplex viruses (SEQ ID NO:178-184, 426-431, 658-665, 897-905), SARS coronavirus (SEQ ID NO:185-202, 432-448, 666-682, 906-924), Epstein-Barr virus (SEQ ID NO:203-204, 449, 925-927), human herpes virus (SEQ ID NO:205-206, 450-451, 863, 928-929), pan bacteria (SEQ ID NO:207-210, 452-454, 684-687, 930-933), Chlamydia (SEQ ID NO:211-226, 455-470, 688-701, 934-949), Mycoplasma (SEQ ID NO:227-238, 471-482, 702-713, 950-962), streptococcus (SEQ ID NO:239-244, 483-488, 714-719, 963-968), Bacillus anthracis (SEQ ID NO:245-250, 489-494, 720-725, 969-97), Streptococcuspyogenes (SEQ ID NO:975-1013), Mycoplasmapneumoniae (SEQ ID NO:1014-1051), Chlamydiapneumoniae (SEQ ID NO:1052-1083), Bacillus thuringiensis (SEQ ID NO:1084-1115), Bacillus subtilis (SEQ ID NO:1116-1154), Bacillus cereus (SEQ ID NO:1155-1157), and B. anthracis (SEQ ID NO:1158-1173.

[0044] Additionally, the microarray had subtyping sequences for influenza A as follows: H1 (SEQ ID NO:1174-1573), H2 (SEQ ID NO:1574-1973), H3 (SEQ ID NO:1975-2373), H4 (SEQ ID NO:2374-2573), H5 (SEQ ID NO:2574-2973), H6 (SEQ ID NO:2974-3369), H7 (SEQ ID NO:3370-3769), H8 (SEQ ID NO:3770-3887), H9 (SEQ ID NO:3888-4287), H10 (SEQ ID NO:4288-4390), H11 (SEQ ID NO:4391-4486), H12 (SEQ ID NO:4487-4587), H13 (SEQ ID NO:4588-4705), H14 (SEQ ID NO:4706-4761), H15 (SEQ ID NO:4762-4807), N1 (SEQ ID NO:4808-5207), N2 (SEQ ID NO:5208-5607), N3 (SEQ ID NO:5608-5878), N4 (SEQ ID NO:5879-5920), N5 (SEQ ID NO:5921-5995), N6 (SEQ ID NO:5996-6116), N7 (SEQ ID NO:6117-6216), N8 (SEQ ID NO:6217-6561), and N9 (SEQ ID NO:6562-6661).

[0045] The microarray was a CombiMatrix CustomArray™ 12k microarray, which was used to synthesize the DNA probes using electrochemical synthesis. The microarray had approximately 12,000 platinum electrodes on a surface having a porous reaction layer. Each electrode was electronically addressable via computer control. The probes were electrochemically synthesized in situ onto known locations associated with the electrodes on the microarray. The known locations were each a volume within the porous reaction layer located over the electrodes. The porous reaction layer was composed of a sucrose matrix. The electrochemical synthesis used phosphoramidite chemistry coupled with electrochemical deblocking of the protecting groups in a confined manner on the synthesized DNA for the addition of each subsequent nucleotide. For bonding of the phosphoramidites, the microarray had organic reactive hydroxyl groups provided by the sucrose. Electrochemical deblocking involved biasing an electrode with current as an anode to generate acidic conditions within a defined volume of the porous reaction layer matrix at the electrode that were sufficient to remove the protecting group only within the defined volume of the porous reaction layer matrix located at the active electrode. Buffer in the solution used for deblocking and natural diffusion prevented deblocking at non-activated electrodes; in other words, the buffer and the resistance associated with natural diffusion confined the region of acidic conditions to the confined volume of the porous reaction layer. Removal of the protecting group allowed addition of the next phosphoramidite.

[0046] After synthesis of all probes, the microarray was exposed to a target sample to allow hybridization of pathogens to the probes. FIG. 4 shows fluorescence versus pathogen type and influenza A subtype for an H1N1 influenza A sample. As expected, the pan influenza A has higher fluorescence as well as the H1 and the N1 subtype probes. FIG. 5 shows fluorescence versus pathogen type and influenza A subtype for an influenza B sample. As expected, the pan influenza B probes show higher fluorescence, and the subtyping of influenza A does not show any increase in fluorescence of the subtype probes.

### EXAMPLE 3

[0047] In this example, microarrays were prepared as in Example 2 except that the microarrays only had probes for influenza A subtyping. Additionally, the microarrays had probes for hybridization and for hybridization followed by extension and ligation of hybridized primers to tagged targets. The extension ligation method is detailed in U.S. patent application Ser. No. 11/110,630 filed 20 Apr. 2005, the disclosure of which is incorporated by reference herein. Briefly, the method comprises (1) providing a microarray device having a plurality of oligonucleotide probes attached thereto, wherein each probe has a terminal nucleotide that is complementary to a target nucleotide; (2) forming a plurality of hybridized structures on the microarray, wherein each hybridized structure is formed by contacting the microarray under a hybridizing condition to a hybridizing solution comprising a plurality of tagged targets and a plurality of detection sequences, wherein each hybridized structure comprises one tagged target hybridized to one probe and to one detection sequence; (3) extending each hybridized structure using an extension-ligation solution; (4) removing non-bound material by washing the microarray; and (5) identifying the target nucleotide and a hybridized sequence from the hybridized structures having ligation. The tag on the targets is preferably added during amplification. The plurality of tagged targets is selected from the group consisting of tagged target DNA and tagged target RNA, and combinations thereof. The tagged target DNA may be a cDNA. The tagged target RNA may be an mRNA. The plurality of tagged targets may be first amplified. Preferably, the amplification is by PCR. Preferably, the hybridizing solution comprises a plurality of tagged targets and a plurality of detection sequences in a buffer solution comprising a 1×T4 ligase buffer. Preferably, the hybridizing condition comprises approximately 45° C. for approximately one hour. Preferably, the extension-ligation solution comprises water, buffer, triphosphate mix, polymerase, and ligase. Preferably, the extension-ligation condition comprises incubation of the microarray exposed to the extension-ligation solution at approximately thirty-seven degrees centigrade for approximately one hour. The polymerase is selected from the group consisting of DNA polymerase and RNA polymerase, and combinations thereof. Preferably, the polymerase is selected from the group consisting of Taq polymerase Stoffel fragment, a reverse transcriptase, E. coli DNA polymerase, Klenow fragment polymerase, T7 RNA polymerase, T3 RNA polymerase, viral replicase, SP6 RNA polymerase, and combinations thereof. Preferably, the buffer is selected from the group consisting of T4 DNA ligase buffer and T4 RNA ligase buffer, and combinations thereof. Preferably, the ligase is selected from the group consisting of E. coli DNA ligase, T4 DNA ligase, and T4 RNA ligase, and combinations thereof. Preferably, the triphosphate mix is selected from the group consisting of dNTP and rNTP.

[0048] The results of subtyping samples of all subtypes of influenza A are shown in FIGS. 6 and 7. The starred subtypes are those that were done using straight hybridization. The subtypes without a star were done using the extension-ligation method.

The application's sequence listing, which the Patent Office published only in electronic form, follows.

SEQUENCE LISTING (6739 sequences)

SEQ ID NO: 1 - DNA, 29 bp, Influenza A
tgtcacctctgactaaggggattttaggg

SEQ ID NO: 2 - DNA, 29 bp, Influenza A
attgttggcgaaatttcaccattgccttc

SEQ ID NO: 3 - DNA, 27 bp, Influenza A
tggcgaaatttcaccattgccttctct

SEQ ID NO: 4 - DNA, 28 bp, Influenza A
tcaaaaatgcaattggggtcctcatcgg

SEQ ID NO: 5 - DNA, 26 bp, Influenza A
aaaatgcaattggggtcctcatcggg

SEQ ID NO: 6 - DNA, 28 bp, Influenza A
ctttgcagggaagaacaccgatcttgag

SEQ ID NO: 7 - DNA, 27 bp, Influenza A
agatcgcgcagagacttgaagatgtct

SEQ ID NO: 8 - DNA, 27 bp, Influenza A
caccgatcttgaggcactcatggaatg

SEQ ID NO: 9 - DNA, 28 bp, Influenza A
aagaacaccgatcttgaggcactcatgg

SEQ ID NO: 10 - DNA, 28 bp, Influenza A
ggaaaatggcgagaacagctaggtcaaa

SEQ ID NO: 11 - DNA, 28 bp, Influenza A
ctttcaccgaagagggagcaattgttgg

SEQ ID NO: 12 - DNA, 22 bp, Influenza B
tgggcagaccaacgtgtgtggg

SEQ ID NO: 13 - DNA, 31 bp, Influenza B
taaacggaacattcctcaaacatcccaatgg

SEQ ID NO: 14 - DNA, 30 bp, Influenza B
aactcactcttcgagcgtcttaatgaagga

SEQ ID NO: 15 - DNA, 31 bp, Influenza B
ggaacattcctcaaacatcccaatggataca

SEQ ID NO: 16 - DNA, 31 bp, Influenza B
attcctcaaacatcccaatggatacaagtcc

SEQ ID NO: 17 - DNA, 28 bp, Influenza B
gcatatgaccagagtggaaggcttgttg

SEQ ID NO: 18 - DNA, 30 bp, Influenza B
taatgaaggacatccaaagccaattcgagc

SEQ ID NO: 19 - DNA, 28 bp, Influenza B
tcctcaactcactcttcgagcgtcttaa

SEQ ID NO: 20 - DNA, 27 bp, Influenza B
aaggacatccaaagccaattcgagcag

SEQ ID NO: 21 - DNA, 34 bp, Influenza B
attatcaccagaagagggagacaattagactagt

SEQ ID NO: 22 - DNA, 32 bp, Influenza B
cttaatgaaggacatccaaagccaattcgagc

SEQ ID NO: 23 - DNA, 27 bp, Influenza B
tgaaggacatccaaagccaattcgagc

SEQ ID NO: 24 - DNA, 26 bp, Influenza B
gacatccaaagccaattcgagcagct

SEQ ID NO: 25 - DNA, 32 bp, Influenza B
cttcgagcgtcttaatgaaggacattcaaagc

SEQ ID NO: 26 - DNA, 29 bp, Influenza B
tcactcttcgagcgtcttaatgaaggaca

SEQ ID NO: 27 - DNA, 32 bp, Influenza B
cttaatgaaggacattcaaagccaattcgagc

SEQ ID NO: 28 - DNA, 28 bp, Influenza B
tgaaggacattcaaagccaattcgagca

SEQ ID NO: 29 - DNA, 32 bp, Influenza B
aacattcctcaaacatcccaatggatacaagt

SEQ ID NO: 30 - DNA, 30 bp, Influenza B
tcctcaaacatcccaatggatacaagtcct

SEQ ID NO: 31 - DNA, 31 bp, Influenza B
tcttaatgaaggacatccaaagccaattcga

SEQ ID NO: 32 - DNA, 26 bp, Influenza B
ggacatccaaagccaattcgagcagc

SEQ ID NO: 33 - DNA, 28 bp, Influenza B
atgaaggacatccaaagccaattcgagc

SEQ ID NO: 34 - DNA, 27 bp, Influenza B
ccaaataagttgcagcccagtgtttgc

SEQ ID NO: 35 - DNA, 23 bp, Influenza B
aagtaggtggagacggggggtct

SEQ ID NO: 36 - DNA, 33 bp, Parainfluenza virus
atttatctgataggccaaagattgttgtcgaga

SEQ ID NO: 37 - DNA, 33 bp, Parainfluenza virus
aaaccatttacctaagtgatggaatcaatcgca

SEQ ID NO: 38 - DNA, 33 bp, Parainfluenza virus
atttacctaagtgatggaatcaatcgcaaaagc

SEQ ID NO: 39 - DNA, 33 bp, Parainfluenza virus
aactcccaaggttgatgaaagatcagattatgc

SEQ ID NO: 40 - DNA, 34 bp, Parainfluenza virus
gagaaatcaaaacaaaaggtacagaacaccagaa

SEQ ID NO: 41 - DNA, 28 bp, Parainfluenza virus
acaagcactgaacacaatgccaacttca

SEQ ID NO: 42 - DNA, 35 bp, Parainfluenza virus
caaatagatatcacaaaactacagcacgtaggtgt

SEQ ID NO: 43 - DNA, 32 bp, Parainfluenza virus
agtcccaaagggatgaagatatcacaaaactt

SEQ ID NO: 44 - DNA, 34 bp, Parainfluenza virus
agatatcacaaaactacagcacgtaggtgtattg

SEQ ID NO: 45 - DNA, 33 bp, Parainfluenza virus
tctgccaaatagatatcacaaaactacagcacg

SEQ ID NO: 46 - DNA, 35 bp, Parainfluenza virus
cctggcgagttcagatactatcctaatattattgc

SEQ ID NO: 47 - DNA, 31 bp, Parainfluenza virus
tcaacagtcccaaagggatgaagatatcaca

SEQ ID NO: 48 - DNA, 36 bp, Parainfluenza virus
gagttgggaaaatcaaacaatggaactagtaatctc

SEQ ID NO: 49 - DNA, 30 bp, Parainfluenza virus
tcacaaaactacagcacgtaggtgtattgg

SEQ ID NO: 50 - DNA, 35 bp, Parainfluenza virus
caactcactcaaaacaaaaattccaaaagagaccg

SEQ ID NO: 51 - DNA, 34 bp, Parainfluenza virus
taggagaaatcaaaacaaaaggtacagaacacca

SEQ ID NO: 52 - DNA, 34 bp, Parainfluenza virus
gaaatcaaaacaaaaggtacagaacaccagaaca

SEQ ID NO: 53 - DNA, 29 bp, Parainfluenza virus
ctctactgagcgacaaccccaatatctca

SEQ ID NO: 54 - DNA, 33 bp, Parainfluenza virus
gttaggctaccttcattatcaattggtgatgca

SEQ ID NO: 55 - DNA, 33 bp, Parainfluenza virus
ttagatctcaagggaaagaccaaatctcatcga

SEQ ID NO: 56 - DNA, 32 bp, Parainfluenza virus
tctcaagggaaagaccaaatctcatcgataca

SEQ ID NO: 57 - DNA, 32 bp, Parainfluenza virus
cttagatgtttgctacagtgtgcttatgcagg

SEQ ID NO: 58 - DNA, 29 bp, Parainfluenza virus
atgcaagtgtatgactgctcctgatcaac

SEQ ID NO: 59 - DNA, 28 bp, Parainfluenza virus
atgtttgctacagtgtgcttatgcaggc

SEQ ID NO: 60 - DNA, 28 bp, Parainfluenza virus
agtgtatgactgctcctgatcaaccacc

SEQ ID NO: 61 - DNA, 34 bp, Parainfluenza virus
ggttaagaaaaggctttttcactcgattagaggc

SEQ ID NO: 62 - DNA, 31 bp, Parainfluenza virus
ctcagggttaagaaaaggctttttcactcga

SEQ ID NO: 63 - DNA, 26 bp, Parainfluenza virus
acaagatggaacagtgcaagcagggc

SEQ ID NO: 64 - DNA, 35 bp, Parainfluenza virus
agggaaaacaattagttcatattggtctacaaccc

SEQ ID NO: 65 - DNA, 31 bp, Parainfluenza virus
tgctataccaggaggttgtgtcttgtattgc

SEQ ID NO: 66 - DNA, 30 bp, Parainfluenza virus
agactcacaaaaatcgagagtgaacccagt

SEQ ID NO: 67 - DNA, 26 bp, Parainfluenza virus
agcaaccgagagagtaaacgagctgg

SEQ ID NO: 68 - DNA, 29 bp, Parainfluenza virus
tcagaagtttaaacaaagggccagagcaa

SEQ ID NO: 69 - DNA, 31 bp, Parainfluenza virus
aagtctcagaagtttaaacaaagggccagag

SEQ ID NO: 70 - DNA, 29 bp, Parainfluenza virus
agtttaaacaaagggccagagcaagttcc

SEQ ID NO: 71 - DNA, 25 bp, Adenovirus
gcccacgcgctagacatgacttttg

SEQ ID NO: 72 - DNA, 33 bp, Adenovirus
tttatgttttgtttgaagtctttgacgtggtcc

SEQ ID NO: 73 - DNA, 35 bp, Adenovirus
ccttctttatgttttgtttgaagtctttgacgtgg

SEQ ID NO: 74 - DNA, 29 bp, Adenovirus
gttttgtttgaagtctttgacgtggtccg

SEQ ID NO: 75 - DNA, 25 bp, Adenovirus
aagtctttgacgtggtccgtgtgca

SEQ ID NO: 76 - DNA, 27 bp, Adenovirus
gtttgaagtctttgacgtggtccgtgt

SEQ ID NO: 77 - DNA, 28 bp, Adenovirus
tttgtttgaagtctttgacgtggtccgt

SEQ ID NO: 78 - DNA, 27 bp, Adenovirus
ttgaagtctttgacgtggtccgtgtgc

SEQ ID NO: 79 - DNA, 31 bp, Adenovirus
tacttcaccctgggaaacaagtttaggaatc

SEQ ID NO: 80 - DNA, 27 bp, Adenovirus
acacctacttcaccctgggaaacaagt

SEQ ID NO: 81 - DNA, 23 bp, Adenovirus
tacctgagtccgggtctggtgca

SEQ ID NO: 82 - DNA, 32 bp, Adenovirus
acacctacttcaatctggggaacaagtttagg

SEQ ID NO: 83 - DNA, 22 bp, Adenovirus
ctggagccgcgactaacgtggt

SEQ ID NO: 84 - DNA, 23 bp, Adenovirus
gccgcgactaacgtggtattggc

SEQ ID NO: 85 - DNA, 28 bp, Adenovirus
aaggacagtctgccaacactaacgtttc

SEQ ID NO: 86 - DNA, 27 bp, Adenovirus
tttgaagtctttgacgtggtccgtgtg

SEQ ID NO: 87 - DNA, 24 bp, Adenovirus
gctctatgccaactcagcccatgc

SEQ ID NO: 88 - DNA, 31 bp, Adenovirus
tgaggttaattacactgactacaaagccgtc

SEQ ID NO: 89 - DNA, 29 bp, Adenovirus
caggcaggtggttgatgaggttaattaca

SEQ ID NO: 90 - DNA, 31 bp, Adenovirus
tagggtatcttgcacctactatgagacaagg

SEQ ID NO: 91 - DNA, 26 bp, Adenovirus
cctgggacagaacatgctctatgcca

SEQ ID NO: 92 - DNA, 29 bp, Adenovirus
ctgagggatacaaggatcgcatgtactcc

SEQ ID NO: 93 - DNA, 28 bp, Adenovirus
cattcccttctccagcaacttcatgtcc

SEQ ID NO: 94 - DNA, 29 bp, Adenovirus
taccaacacaacaactctggctttgtagg

SEQ ID NO: 95 - DNA, 29 bp, Adenovirus
acaactctggctttgtagggtatcttgca

SEQ ID NO: 96 - DNA, 31 bp, Enterovirus
tactggctgcttatggtgacaattgaaaagt

SEQ ID NO: 97 - DNA, 33 bp, Enterovirus
gctgcttatggtgacaattgaaaagttgttacc

SEQ ID NO: 98 - DNA, 30 bp, Enterovirus
ttccttactggctgcttatggtgacaattg

SEQ ID NO: 99 - DNA, 26 bp, Enterovirus
gaaccgactactttgggtgtccgtgt

SEQ ID NO: 100 - DNA, 28 bp, Enterovirus
gactactttgggtgtccgtgtttccttt

SEQ ID NO: 101 - DNA, 30 bp, Enterovirus
aacctagtagcaccatgaaagttgcagagt

SEQ ID NO: 102 - DNA, 28 bp, Enterovirus
caccatgaaagttgcagagtgtttcgct

SEQ ID NO: 103 - DNA, 29 bp, Enterovirus
cgttacccggctaactacttcgagaaacc

SEQ ID NO: 104 - DNA, 28 bp, Enterovirus
cccggctaactacttcgagaaacctagt

SEQ ID NO: 105 - DNA, 27 bp, Enterovirus
tcaatccagagggtagcgtgtcgtaac

SEQ ID NO: 106 - DNA, 23 bp, Enterovirus
taactgcggagcatgtgccctca

SEQ ID NO: 107 - DNA, 28 bp, Enterovirus
aacccagtgagtaggttgtcgtaatgcg

SEQ ID NO: 108 - DNA, 30 bp, Enterovirus
actttgggtgtccgtgtttccctttatatt

SEQ ID NO: 109 - DNA, 35 bp, Enterovirus
tctaatacagacatggtgtgaagagtctattgagc

SEQ ID NO: 110 - DNA, 31 bp, Enterovirus
gacgctctaatacagacatggtgtgaagagt

SEQ ID NO: 111 - DNA, 33 bp, Enterovirus
acatggtgtgaagagtctattgagctagttagt

SEQ ID NO: 112 - DNA, 36 bp, Enterovirus
gtgtgaagagtctattgagctagttagtaatcctcc

SEQ ID NO: 113 - DNA, 31 bp, Enterovirus
tacagacatggtgtgaagagtctattgagct

SEQ ID NO: 114 - DNA, 25 bp, Enterovirus
tcccccgtgtagatcaggtcgatga

SEQ ID NO: 115 - DNA, 26 bp, Enterovirus
cgtgtagatcaggtcgatgagccact

SEQ ID NO: 116 - DNA, 34 bp, Enterovirus
tggttactgcaaatttcactgagactaacaatgg

SEQ ID NO: 117 - DNA, 31 bp, Enterovirus
actgcaaatttcactgagactaacaatgggc

SEQ ID NO: 118 - DNA, 36 bp, Enterovirus
tggagttcttcacctattctagatttgatatggaac

SEQ ID NO: 119 - DNA, 38 bp, Enterovirus
cacctattctagatttgatatggaacttacctttgtgg

SEQ ID NO: 120 - DNA, 27 bp, Enterovirus
ggccacaaatccactagtcccttctga

SEQ ID NO: 121 - DNA, 30 bp, Enterovirus
ccactagtcccttctgatacagtgcaaacc

SEQ ID NO: 122 - DNA, 30 bp, Rhinovirus
gtagacctggtagatgaggctagagattcc

SEQ ID NO: 123 - DNA, 25 bp, Rhinovirus
gcgtgtgctcatcttgagtcctccg

SEQ ID NO: 124 - DNA, 24 bp, Rhinovirus
gagccgcgtgtgctcatcttgagt

SEQ ID NO: 125 - DNA, 34 bp, Rhinovirus
taacttagaagcaaagcaaactgatcaatagggg

SEQ ID NO: 126 - DNA, 31 bp, Rhinovirus
tagaagcaaagcaaactgatcaataggggac

SEQ ID NO: 127 - DNA, 31 bp, Rhinovirus
gcaaagcaaactgatcaataggggacaatca

SEQ ID NO: 128 - DNA, 30 bp, Rhinovirus
gcaaactgatcaataggggacaatcatcca

SEQ ID NO: 129 - DNA, 28 bp, Rhinovirus
tgaaagatacttggttggtcgctcagct

SEQ ID NO: 130 - DNA, 29 bp, Rhinovirus
cacaatccagtgtgtagctggtcgtaatg

SEQ ID NO: 131 - DNA, 30 bp, Rhinovirus
aagggcaaaaacaactgagatcgttatccg

SEQ ID NO: 132 - DNA, 30 bp, Rhinovirus
caagatgcctacgcaaagcctagtaataca

SEQ ID NO: 133 - DNA, 28 bp, Rhinovirus
tccacaagggcaaaaacaactgagatcg

SEQ ID NO: 134 - DNA, 29 bp, Rhinovirus
ccaacagtagacctggtagatgaggctag

SEQ ID NO: 135 - DNA, 30 bp, Rhinovirus
gttgatatgctccacaagggcaaaaacaac

SEQ ID NO: 136 - DNA, 27 bp, Rhinovirus
aacctggcagatgaggctagaagttcc

SEQ ID NO: 137 - DNA, 28 bp, Rhinovirus
gctggttgttccactacaaacccagtag

SEQ ID NO: 138 - DNA, 26 bp, Rhinovirus
tatccgcaagatgcctacgcaaagct

SEQ ID NO: 139 - DNA, 31 bp, Human metapneumovirus
tagaatggacatcccaaaaattgccagatcc

SEQ ID NO: 140 - DNA, 28 bp, Human metapneumovirus
tggacatcccaaaaattgccagatcctt

SEQ ID NO: 141 - DNA, 31 bp, Human metapneumovirus
cattgagtatggcaaagcattaggctcatca

SEQ ID NO: 142 - DNA, 29 bp, Respiratory syncytial virus
ggggtagtagagttgaaggaatcttcgca

SEQ ID NO: 143 - DNA, 35 bp, Respiratory syncytial virus
gggatgataatactgtgtatagctgctcttgtaat

SEQ ID NO: 144 - DNA, 34 bp, Respiratory syncytial virus
tacaagggcctaataccaaaggatatagctaaca

SEQ ID NO: 145 - DNA, 33 bp, Respiratory syncytial virus
gggcctaataccaaaggatatagctaacagttt

SEQ ID NO: 146 - DNA, 32 bp, Respiratory syncytial virus
actgtgggatgataatactgtgtatagctgct

SEQ ID NO: 147 - DNA, 31 bp, Respiratory syncytial virus
gatcaggtcttacagcagtaattaggagggc

SEQ ID NO: 148 - DNA, 31 bp, Respiratory syncytial virus
gctacaagggcctaataccaaaggatatagc

SEQ ID NO: 149 - DNA, 33 bp, Respiratory syncytial virus
aagggcctaataccaaaggatatagctaacagt

SEQ ID NO: 150 - DNA, 30 bp, Respiratory syncytial virus
ggattgtttatgaatgcctatggtgcaggg

SEQ ID NO: 151 - DNA, 27 bp, Respiratory syncytial virus
tacggtggggagtcttagcaaaatcga

SEQ ID NO: 152 - DNA, 29 bp, Respiratory syncytial virus
agtcagtagtaggccatgtgaattccctg

SEQ ID NO: 153 - DNA, 28 bp, Respiratory syncytial virus
gtagtaggccatgtgaattccctgcatc

SEQ ID NO: 154 - DNA, 28 bp, Respiratory syncytial virus
tcagtagtaggccatgtgaattccctgc

SEQ ID NO: 155 - DNA, 32 bp, Respiratory syncytial virus
ttccctgcatcaataccagcttatagaacaac

SEQ ID NO: 156 - DNA, 36 bp, Respiratory syncytial virus
ttccaacaaaagaacaacagactactagagattacc

SEQ ID NO: 157 - DNA, 33 bp, Respiratory syncytial virus
tgtgatagagttccaacaaaagaacaacagact

SEQ ID NO: 158 - DNA, 35 bp, Respiratory syncytial virus
tagagttccaacaaaagaacaacagactactagag

SEQ ID NO: 159 - DNA, 30 bp, Respiratory syncytial virus
atcacatctctaggagccattgtgtcatgc

SEQ ID NO: 160 - DNA, 31 bp, Respiratory syncytial virus
taaatttctatgacccattggtgttcccctc

SEQ ID NO: 161 - DNA, 31 bp, Respiratory syncytial virus
aaaaacagatgtaagcagctccgttatcaca

SEQ ID NO: 162 - DNA, 33 bp, Respiratory syncytial virus
ttatgacttcaaaaacagatgtaagcagctccg

SEQ ID NO: 163 - DNA, 33 bp, Respiratory syncytial virus
tgtgtcatgctatggcaaaactaaatgtacagc

SEQ ID NO: 164 - DNA, 29 bp, Respiratory syncytial virus
acttcaaaaacagatgtaagcagctccgt

SEQ ID NO: 165 - DNA, 31 bp, Respiratory syncytial virus
tagaaggggaagtgaacaagatcaaaagtgc

SEQ ID NO: 166 - DNA, 27 bp, Respiratory syncytial virus
ctaaggtcctgcacctagaaggggaag

SEQ ID NO: 167 - DNA, 29 bp, Respiratory syncytial virus
ggggaagtgaacaagatcaaaagtgctct

SEQ ID NO: 168 - DNA, 34 bp, Respiratory syncytial virus
gttttaaccagcaaagtgttagacctcaaaaact

SEQ ID NO: 169 - DNA, 36 bp, Respiratory syncytial virus
agaggaagtcttagcatatgtagtacaattaccact

SEQ ID NO: 170 - DNA, 27 bp, Respiratory syncytial virus
atgcaggcgtaactacacctgtaagca

SEQ ID NO: 171 - DNA, 29 bp, Respiratory syncytial virus
gcacctagaaggggaagtgaacaagatca

SEQ ID NO: 172 - DNA, 33 bp, Respiratory syncytial virus
gagattaccagggaatttagtgttaatgcaggc

SEQ ID NO: 173 - DNA, 30 bp, Respiratory syncytial virus
acaaggctgtagtcagcttatcaaatggag

SEQ ID NO: 174 - DNA, 35 bp, Respiratory syncytial virus
aacagactactagagattaccagggaatttagtgt

SEQ ID NO: 175 - DNA, 31 bp, Respiratory syncytial virus
gcgactgtgatagagttccaacaaaagaaca

SEQ ID NO: 176 - DNA, 29 bp, Respiratory syncytial virus
taatgcaggcgtaactacacctgtaagca

SEQ ID NO: 177 - DNA, 29 bp, Respiratory syncytial virus
caggcgtaactacacctgtaagcacttac

SEQ ID NO: 178 - DNA, 34 bp, Herpes simplex virus
gggtataacaaagtctgtctttaaaaagcagggg

SEQ ID NO: 179 - DNA, 30 bp, Herpes simplex virus
aagtctgtctttaaaaagcaggggttaggg

SEQ ID NO: 180 - DNA, 30 bp, Herpes simplex virus
tgtctttaaaaagcaggggttagggagttg

SEQ ID NO: 181 - DNA, 31 bp, Herpes simplex virus
ctttaaaaagcaggggttagggagttgttcg

SEQ ID NO: 182 - DNA, 24 bp, Herpes simplex virus
cgggcaaggactacctggagatcg

SEQ ID NO: 183 - DNA, 26 bp, Herpes simplex virus
cagcaccgtcatccacaccttatcgt

SEQ ID NO: 184 - DNA, 26 bp, Herpes simplex virus
gtgtattgttgcgatggcgacacacc

SEQ ID NO: 185 - DNA, 23 bp, SARS Coronavirus
aaggaacgcgcacgtacagtggg

SEQ ID NO: 186 - DNA, 35 bp, SARS Coronavirus
gcgtctctttattagctactatgactacaagacag

SEQ ID NO: 187 - DNA, 31 bp, SARS Coronavirus
gggtggcgtctctttattagctactatgact

SEQ ID NO: 188 - DNA, 27 bp, SARS Coronavirus
acagtgggtggcgtctctttattagct

SEQ ID NO: 189 - DNA, 28 bp, SARS Coronavirus
attaagtgagatggtcatgtgtggcggc

SEQ ID NO: 190 - DNA, 33 bp, SARS Coronavirus
tctacaacacaggctctatgagtgtctctatag

SEQ ID NO: 191 - DNA, 38 bp, SARS Coronavirus
ctatgagtgtctctatagaaatagggatgttgatcatg

SEQ ID NO: 192 - DNA, 35 bp, SARS Coronavirus
gcacttctttcaactgatggtaataagatagctga

SEQ ID NO: 193 - DNA, 35 bp, SARS Coronavirus
aacacaggctctatgagtgtctctatagaaatagg

SEQ ID NO: 194 - DNA, 34 bp, SARS Coronavirus
aggctctatgagtgtctctatagaaatagggatg

SEQ ID NO: 195 - DNA, 34 bp, SARS Coronavirus
tacgtcgccttattaaagatgttgataatcctgt

SEQ ID NO: 196 - DNA, 27 bp, SARS Coronavirus
tgcaggtttgacacacgtacacgatct

SEQ ID NO: 197 - DNA, 30 bp, SARS Coronavirus
actagagatgctgtgggtactaacctacct

SEQ ID NO: 198 - DNA, 29 bp, SARS Coronavirus
agatgctgtgggtactaacctacctctcc

SEQ ID NO: 199 - DNA, 32 bp, SARS Coronavirus
taacctacctctccagctaggattttctacag

SEQ ID NO: 200 - DNA, 25 bp, SARS Coronavirus
cccgcgaagaagctattcgtcacgt

SEQ ID NO: 201 - DNA, 31 bp, SARS Coronavirus
ggtactaacctacctctccagctaggatttt

SEQ ID NO: 202 - DNA, 34 bp, SARS Coronavirus
gtaacttatcacaccgtttctacaggttagctaa

SEQ ID NO: 203 - DNA, 22 bp, Epstein-Barr virus
agcagtacgagtgcctgcgacc

SEQ ID NO: 204 - DNA, 23 bp, Epstein-Barr virus
tacgagtgcctgcgaccagatcg

SEQ ID NO: 205 - DNA, 31 bp, Human herpes virus
gtgcattggaaagaccgaaaatagatcttgc

SEQ ID NO: 206 - DNA, 23 bp, Human herpes virus
gcaactggggcacgctattctgc

SEQ ID NO: 207 - DNA, 30 bp, Pan bacteria
gactttctggtctgtaactgacactgaggc

SEQ ID NO: 208 - DNA, 27 bp, Pan bacteria
ttccgccctttagtgctgaagttaacg

SEQ ID NO: 209 - DNA, 33 bp, Pan bacteria
ggtcttgacatcctttgaaaaccctagagatag

SEQ ID NO: 210 - DNA, 30 bp, Pan bacteria
gccatcattaagttgggcactttaaggtga

SEQ ID NO: 211 - DNA, 32 bp, Chlamydia
ggaacaaagtctgcgaccatcaattatcatga

SEQ ID NO: 212 - DNA, 32 bp, Chlamydia
accatcaattatcatgaatggcaagtaggagc

SEQ ID NO: 213 - DNA, 31 bp, Chlamydia
caattatcatgaatggcaagtaggagcctct

SEQ ID NO: 214 - DNA, 28 bp, Chlamydia
atcatgaatggcaagtaggagcctctct

SEQ ID NO: 215 - DNA, 26 bp, Chlamydia
atgggaatgcggttgtgcaactttgg

SEQ ID NO: 216 - DNA, 29 bp, Chlamydia
ttgggagctgaattccaatatgcacagtc

SEQ ID NO: 217 - DNA, 34 bp, Chlamydia
ttgaagaacttaatgtgatctgtaacgtatcgca

SEQ ID NO: 218 - DNA, 35 bp, Chlamydia
gaacttaatgtgatctgtaacgtatcgcaattctc

SEQ ID NO: 219 - DNA, 22 bp, Chlamydia
atggctgtcgtcagctcgtgcc

SEQ ID NO: 220 - DNA, 23 bp, Chlamydia
ttctcgggccttgtacacaccgc

SEQ ID NO: 221 - DNA, 24 bp, Chlamydia
aacgccgtgaatacgttctcgggc

SEQ ID NO: 222 - DNA, 24 bp, Chlamydia
ttgtacacaccgcccgtcacatca

SEQ ID NO: 223 - DNA, 28 bp, Chlamydia
cccagttcggattgtagtctgcaactcg

SEQ ID NO: 224 - DNA, 27 bp, Chlamydia
cgtgaatacgttctcgggccttgtaca

SEQ ID NO: 225 - DNA, 26 bp, Chlamydia
tgtcagccataacgccgtgaatacgt

SEQ ID NO: 226 - DNA, 26 bp, Chlamydia
atacgttctcgggccttgtacacacc

SEQ ID NO: 227 - DNA, 24 bp, Mycoplasma
cgggcaatcccgactcgttaaagc

SEQ ID NO: 228 - DNA, 29 bp, Mycoplasma
cacttcaggggacaacttgacgaattaca

SEQ ID NO: 229 - DNA, 28 bp, Mycoplasma
caggggacaacttgacgaattacaccaa

SEQ ID NO: 230 - DNA, 25 bp, Mycoplasma
gcagcagggcagttcttcaggtaca

SEQ ID NO: 231 - DNA, 30 bp, Mycoplasma
agggcagttcttcaggtacaactaattccg

SEQ ID NO: 232 - DNA, 24 bp, Mycoplasma
ccaccaactacaccaacctccccc

SEQ ID NO: 233 - DNA, 24 bp, Mycoplasma
aactacaccaacctcccccccaac

SEQ ID NO: 234 - DNA, 27 bp, Mycoplasma
caacaagaggccaccaactacaccaac

SEQ ID NO: 235 - DNA, 24 bp, Mycoplasma
aacggcctaccaaggcaatgacgt

SEQ ID NO: 236 - DNA, 26 bp, Mycoplasma
gatgagggtgcgccatatcagctagt

SEQ ID NO: 237 - DNA, 28 bp, Mycoplasma
cctaccaaggcaatgacgtgtagctatg

SEQ ID NO: 238 - DNA, 28 bp, Mycoplasma
caaggcaatgacgtgtagctatgctgag

SEQ ID NO: 239 - DNA, 30 bp, Streptococcus
cctgcttcagccgccataaaaatatctttg

SEQ ID NO: 240 - DNA, 33 bp, Streptococcus
gggacagattaggtttgaggggattgatattac

SEQ ID NO: 241 - DNA, 26 bp, Streptococcus
gcttgcccgaagtttgtaccgattgt

SEQ ID NO: 242 - DNA, 29 bp, Streptococcus
tgttgaaaaggttatgggagtgcaggaat

SEQ ID NO: 243 - DNA, 27 bp, Streptococcus
gattattggtcaagcaggggcacaagt

SEQ ID NO: 244 - DNA, 33 bp, Streptococcus
tgagtaaagaaaaagctgaagaattagggctcc

SEQ ID NO: 245 - DNA, 33 bp, Bacillus anthracis
tccaataccacggaattcaaaaatctcaaatgg

SEQ ID NO: 246 - DNA, 33 bp, Bacillus anthracis
cggaattcaaaaatctcaaatggcataacagga

SEQ ID NO: 247 - DNA, 31 bp, Bacillus anthracis
tgccgcaaattttctacggccatataaaatc

SEQ ID NO: 248 - DNA, 33 bp, Bacillus anthracis
acggccatataaaatcatgaatcttgaaacacc

SEQ ID NO: 249 - DNA, 34 bp, Bacillus anthracis
atttctttctgacttggaatagcttgctgatacg

SEQ ID NO: 250 - DNA, 30 bp, Bacillus anthracis
tttctgacttggaatagcttgctgatacgg

SEQ ID NO: 251 - DNA, 36 bp, Influenza A
tgtcacctctgactaaggggattttagggtttgtgt

SEQ ID NO: 252 - DNA, 33 bp, Influenza A
tggcgaaatttcaccattgccttctcttccagg

SEQ ID NO: 253 - DNA, 35 bp, Influenza A
cgggggacttgaatggaatgataacacagttcgag

SEQ ID NO: 254 - DNA, 34 bp, Influenza A
ggatgtcaaaaatgcaattggggtcctcatcggg

SEQ ID NO: 255 - DNA, 32 bp, Influenza A
tgtcaaaaatgcaattggggtcctcatcgggg

SEQ ID NO: 256 - DNA, 33 bp, Influenza A
caagaccaatcctgtcacctctgactaagggga

SEQ ID NO: 257 - DNA, 31 bp, Influenza A
gcgcagagacttgaagatgtctttgcaggga

SEQ ID NO: 258 - DNA, 33 bp, Influenza A
agatcgcgcagagacttgaagatgtctttgcag

SEQ ID NO: 259 - DNA, 35 bp, Influenza A
gagacttgaagatgtctttgcagggaagaacaccg

SEQ ID NO: 260 - DNA, 37 bp, Influenza A
ggaaaatggcgagaacagctaggtcaaaagtttgaag

SEQ ID NO: 261 - DNA, 30 bp, Influenza A
aagggctttcaccgaagagggagcaattgt

SEQ ID NO: 262 - DNA, 34 bp, Influenza B
gggatcacaccttcggcaaaagcttcaatactcc

SEQ ID NO: 263 - DNA, 33 bp, Influenza B
gggagtcttatcccaatttggtcaagagcaccg

SEQ ID NO: 264 - DNA, 42 bp, Influenza B
catcccaatggatacaagtccttatcaactctgcatagattg

SEQ ID NO: 265 - DNA, 38 bp, Influenza B
tagattgaatgcatatgaccagagtggaaggcttgttg

SEQ ID NO: 266 - DNA, 34 bp, Influenza B
taatgaaggacatccaaagccaattcgagcagct

SEQ ID NO: 267 - DNA, 38 bp, Influenza B
tatcaccagaagagggagacaattagactagtcacgga

SEQ ID NO: 268 - DNA, 40 bp, Influenza B
ccgattatcaccagaagagggagacaattagactagtcac

SEQ ID NO: 269 - DNA, 37 bp, Influenza B
ccagaagagggagacaattagactagtcacggaagaa

SEQ ID NO: 270 - DNA, 34 bp, Influenza B
tgaatgcatatgaccagagtggaaggcttgttgc

SEQ ID NO: 271 - DNA, 39 bp, Influenza B
attatcaccagaagagggagacaattagactagtcacgg

SEQ ID NO: 272 - DNA, 36 bp, Influenza B
cttaatgaaggacatccaaagccaattcgagcagct

SEQ ID NO: 273 - DNA, 36 bp, Influenza B
caccagaagagggagacaattagactagtcacggaa

SEQ ID NO: 274 - DNA, 31 bp, Influenza B
tgaaggacatccaaagccaattcgagcagct

SEQ ID NO: 275 - DNA, 43 bp, Influenza B
gggagacaattagactggtcacggaagaactttatcttttaag

SEQ ID NO: 276 - DNA, 37 bp, Influenza B
tcactcttcgagcgtcttaatgaaggacattcaaagc

SEQ ID NO: 277 - DNA, 39 bp, Influenza B
cttcgagcgtcttaatgaaggacattcaaagccaattcg

SEQ ID NO: 278 - DNA, 37 bp, Influenza B
agcgtcttaatgaaggacattcaaagccaattcgagc

SEQ ID NO: 279 - DNA, 41 bp, Influenza B
tcccaatggatacaagtccttatcaactctgcatagattga

SEQ ID NO: 280 - DNA, 36 bp, Influenza B
gcatagattgaatgcatatgaccagagtggaaggct

SEQ ID NO: 281 - DNA, 33 bp, Influenza B
aatgcatatgaccagagtggaaggcttgttgct

SEQ ID NO: 282 - DNA, 37 bp, Influenza B
gattgaatgcatatgaccagagtggaaggcttgttgc

SEQ ID NO: 283 - DNA, 32 bp, Influenza B
atgaaggacatccaaagccaattcgagcagct

SEQ ID NO: 284 - DNA, 28 bp, Influenza B
gaacgaagtaggtggagacggggggtct

SEQ ID NO: 285 - DNA, 34 bp, Influenza B
taagttgcagcccagtgtttgcagtagaaagacc

SEQ ID NO: 286 - DNA, 44 bp, Parainfluenza virus
caaatagatatcacaaaactacagcacgtaggtgtattggtcaa

SEQ ID NO: 287 - DNA, 45 bp, Parainfluenza virus
accttctttacctggcgagttcagatactatcctaatattattgc

SEQ ID NO: 288 - DNA, 42 bp, Parainfluenza virus
atctttctgccaaatagatatcacaaaactacagcacgtagg

SEQ ID NO: 289 - DNA, 41 bp, Parainfluenza virus
agatatcacaaaactacagcacgtaggtgtattggtcaaca

SEQ ID NO: 290 - DNA, 38 bp, Parainfluenza virus
attggtcaacagtcccaaagggatgaagatatcacaaa

SEQ ID NO: 291 - DNA, 40 bp, Parainfluenza virus
tctgccaaatagatatcacaaaactacagcacgtaggtgt

SEQ ID NO: 292 - DNA, 34 bp, Parainfluenza virus
acacaacaagcactgaacacaatgccaacttcaa

SEQ ID NO: 293 - DNA, 35 bp, Parainfluenza virus
acaagcactgaacacaatgccaacttcaatactgc

SEQ ID NO: 294 - DNA, 42 bp, Parainfluenza virus
agtcccaaagggatgaagatatcacaaaactttgaaacaaga

SEQ ID NO: 295 - DNA, 40 bp, Parainfluenza virus
tcaacagtcccaaagggatgaagatatcacaaaactttga

SEQ ID NO: 296 - DNA, 34 bp, Parainfluenza virus
agtcacactcgcaagaataagagagaagggacca

SEQ ID NO: 297 - DNA, 42 bp, Parainfluenza virus
taggagaaatcaaaacaaaaggtacagaacaccagaacaaca

SEQ ID NO: 298 - DNA, 40 bp, Parainfluenza virus
acatccaactcactcaaaacaaaaattccaaaagagaccg

SEQ ID NO: 299 - DNA, 41 bp, Parainfluenza virus
gtctactttctggatcaaccacaatctcaggatgtgttagg

SEQ ID NO: 300 - DNA, 37 bp, Parainfluenza virus
ctttctggatcaaccacaatctcaggatgtgttaggc

SEQ ID NO: 301 - DNA, 45 bp, Parainfluenza virus
cgatacaaaaatgaagatataacctttgaccatcctttctctgca

SEQ ID NO: 302 - DNA, 39 bp, Parainfluenza virus
ggatagtaacatgcaagtgtatgactgctcctgatcaac

SEQ ID NO: 303 - DNA, 36 bp, Parainfluenza virus
gtaacatgcaagtgtatgactgctcctgatcaacca

SEQ ID NO: 304 - DNA, 35 bp, Parainfluenza virus
agtgtatgactgctcctgatcaaccaccagtatca

SEQ ID NO: 305 - DNA, 33 bp, Parainfluenza virus
atgcaagtgtatgactgctcctgatcaaccacc

SEQ ID NO: 306 - DNA, 41 bp, Parainfluenza virus
agatcttgttcacacatttgggtatccatcatgtttaggag

SEQ ID NO: 307 - DNA, 38 bp, Parainfluenza virus
ttgttcacacatttgggtatccatcatgtttaggagct

SEQ ID NO: 308 - DNA, 31 bp, Parainfluenza virus
ttcagacaagatggaacagtgcaagcagggc

SEQ ID NO: 309 - DNA, 42 bp, Parainfluenza virus
agggaaaacaattagttcatattggtctacaacccgaaatga

SEQ ID NO: 310 - DNA, 33 bp, Parainfluenza virus
cgcaaaagctgttcagtcactgctataccagga

SEQ ID NO: 311 - DNA, 41 bp, Parainfluenza virus
cacaaaaatcgagagtgaacccagtcataacttactcaaca

SEQ ID NO: 312 - DNA, 39 bp, Parainfluenza virus
aaatcgagagtgaacccagtcataacttactcaacagca

SEQ ID NO: 313 - DNA, 35 bp, Parainfluenza virus
tcagaagtttaaacaaagggccagagcaagttcct

SEQ ID NO: 314 - DNA, 33 bp, Parainfluenza virus
ttcctataatcgtcactggcactggcgatgtct

SEQ ID NO: 315 - DNA, 35 bp, Parainfluenza virus
ctggcactggcgatgtctcaaaatttgttgatcaa

SEQ ID NO: 316 - DNA, 39 bp, Adenovirus
ccttctttatgttttgtttgaagtctttgacgtggtccg

SEQ ID NO: 317 - DNA, 37 bp, Adenovirus
caggaactgaaagccattgtcaaagatcttggttgtg

SEQ ID NO: 318 - DNA, 35 bp, Adenovirus
actgaaagccattgtcaaagatcttggttgtgggc

SEQ ID NO: 319 - DNA, 37 bp, Adenovirus
gtgagcaggaactgaaagccattgtcaaagatcttgg

SEQ ID NO: 320 - DNA, 32 bp, Adenovirus
aagccattgtcaaagatcttggttgtgggcca

SEQ ID NO: 321 - DNA, 34 bp, Adenovirus
gttttgtttgaagtctttgacgtggtccgtgtgc

SEQ ID NO: 322 - DNA, 37 bp, Adenovirus
tatgttttgtttgaagtctttgacgtggtccgtgtgc

SEQ ID NO: 323 - DNA, 33 bp, Adenovirus
tttgtttgaagtctttgacgtggtccgtgtgca

SEQ ID NO: 324 - DNA, 37 bp, Adenovirus
acacctacttcaccctgggaaacaagtttaggaatcc

SEQ ID NO: 325 - DNA, 27 bp, Adenovirus
cccactgtggctcccacccatgatgtc

SEQ ID NO: 326 - DNA, 37 bp, Adenovirus
cacagacacctacttcaatctggggaacaagtttagg

SEQ ID NO: 327 - DNA, 28 bp, Adenovirus
tacctgagtccgggtctggtgcagttcg

SEQ ID NO: 328 - DNA, 25 bp, Adenovirus
ccgcccacgcgctagacatgacctt

SEQ ID NO: 329 - DNA, 30 bp, Adenovirus
gtaccccggttcgagtccccttgaatcagg

SEQ ID NO: 330 - DNA, 28 bp, Adenovirus
ctggagccgcgactaacgtggtattggc

SEQ ID NO: 331 - DNA, 33 bp, Adenovirus
tcgacaaggacagtctgccaacactaacgtttc

SEQ ID NO: 332 - DNA, 34 bp, Adenovirus
ttttgtttgaagtctttgacgtggtccgtgtgca

SEQ ID NO: 333 - DNA, 30 bp, Adenovirus
aacatgctctatgccaactcagcccatgcg

SEQ ID NO: 334 - DNA, 36 bp, Adenovirus
tagggtatcttgcacctactatgagacaaggggaac

SEQ ID NO: 335 - DNA, 39 bp, Adenovirus
gttgatgaggttaattacactgactacaaagccgtcacc

SEQ ID NO: 336 - DNA, 39 bp, Adenovirus
tgaggttaattacactgactacaaagccgtcaccttacc

SEQ ID NO: 337 - DNA, 37 bp, Adenovirus
tatcttgcacctactatgagacaaggggaaccttacc

SEQ ID NO: 338 - DNA, 33 bp, Adenovirus
tgcacctactatgagacaaggggaaccttaccc

SEQ ID NO: 339 - DNA, 33 bp, Adenovirus
ctactatgagacaaggggaaccttacccagcca

SEQ ID NO: 340 - DNA, 35 bp, Adenovirus
acacaacaactctggctttgtagggtatcttgcac

SEQ ID NO: 341 - DNA, 35 bp, Adenovirus
gatgagcccaccctgctttatcttcttttcgaagt

SEQ ID NO: 342 - DNA, 41 bp, Enterovirus
tttccttttattccttactggctgcttatggtgacaattga

SEQ ID NO: 343 - DNA, 39 bp, Enterovirus
ttccttactggctgcttatggtgacaattgaaaagttgt

SEQ ID NO: 344 - DNA, 39 bp, Enterovirus
tactggctgcttatggtgacaattgaaaagttgttacca

SEQ ID NO: 345 - DNA, 26 bp, Enterovirus
cctaactgcggagcacgcaccctcaa

SEQ ID NO: 346 - DNA, 32 bp, Enterovirus
gaaccgactactttgggtgtccgtgtttcctt

SEQ ID NO: 347 - DNA, 38 bp, Enterovirus
tacttcgagaaacctagtagcaccatgaaagttgcaga

SEQ ID NO: 348 - DNA, 35 bp, Enterovirus
aatagactgcttacgcggttgaaggagaaaacgtt

SEQ ID NO: 349 - DNA, 36 bp, Enterovirus
aacctagtagcaccatgaaagttgcagagtgtttcg

SEQ ID NO: 350 - DNA, 33 bp, Enterovirus
agtagcaccatgaaagttgcagagtgtttcgct

SEQ ID NO: 351 - DNA, 36 bp, Enterovirus
cgagaaacctagtagcaccatgaaagttgcagagtg

SEQ ID NO: 352 - DNA, 32 bp, Enterovirus
actgcttacgcggttgaaggagaaaacgttcg

SEQ ID NO: 353 - DNA, 29 bp, Enterovirus
taactgcggagcatgtgccctcaatccag

SEQ ID NO: 354 - DNA, 27 bp, Enterovirus
gcggagcatgtgccctcaatccagagg

SEQ ID NO: 355 - DNA, 32 bp, Enterovirus
gtaatgcgtaagtctgtggcggaaccgactac

SEQ ID NO: 356 - DNA, 31 bp, Enterovirus
ggaaccgactactttgggtgtccgtgtttcc

SEQ ID NO: 357 - DNA, 45 bp, Enterovirus
tctaatacagacatggtgtgaagagtctattgagctagttagtaa

SEQ ID NO: 358 - DNA, 37 bp, Enterovirus
cgttacccggctaactacttcaagaaacctagtagca

SEQ ID NO: 359 - DNA, 35 bp, Enterovirus
cccggctaactacttcaagaaacctagtagcacca

SEQ ID NO: 360 - DNA, 44 bp, Enterovirus
tacagacatggtgtgaagagtctattgagctagttagtaatcct

SEQ ID NO: 361 - DNA, 30 bp, Enterovirus
tgaaagtcgcagagtgtttcgctcagcact

SEQ ID NO: 362 - DNA, 41 bp, Enterovirus
acatggtgtgaagagtctattgagctagttagtaatcctcc

SEQ ID NO: 363 - DNA, 42 bp, Enterovirus
tgatatggaacttacctttgtggttactgcaaatttcactga

SEQ ID NO: 364 - DNA, 39 bp, Enterovirus
tggaacttacctttgtggttactgcaaatttcactgaga

SEQ ID NO: 365 - DNA, 35 bp, Enterovirus
agtcccttctgatacagtgcaaaccagacatgttg

SEQ ID NO: 366 - DNA, 37 bp, Enterovirus
caaatccactagtcccttctgatacagtgcaaaccag

SEQ ID NO: 367 - DNA, 35 bp, Enterovirus
ggccacaaatccactagtcccttctgatacagtgc

SEQ ID NO: 368 - DNA, 35 bp, Enterovirus
ccactagtcccttctgatacagtgcaaaccagaca

SEQ ID NO: 369 - DNA, 35 bp, Rhinovirus
gtagacctggtagatgaggctagagattcccctcc

SEQ ID NO: 370 - DNA, 25 bp, Rhinovirus
ttctagcctgcgtggctgcctgcac

SEQ ID NO: 371 - DNA, 41 bp, Rhinovirus
taacttagaagcaaagcaaactgatcaataggggacaatca

SEQ ID NO: 372 - DNA, 43 bp, Rhinovirus
ttcccaaatgtaacttagaagcaaagcaaactgatcaataggg

SEQ ID NO: 373 - DNA, 32 bp, Rhinovirus
ctgggtgtgaagccaagtattggacaaggtgt

SEQ ID NO: 374 - DNA, 39 bp, Rhinovirus
tagaagcaaagcaaactgatcaataggggacaatcatcc

SEQ ID NO: 375 - DNA, 37 bp, Rhinovirus
gcaaagcaaactgatcaataggggacaatcatccaga

SEQ ID NO: 376 - DNA, 31 bp, Rhinovirus
gcccctgaatgtggctaaccttaaacctgca

SEQ ID NO: 377 - DNA, 33 bp, Rhinovirus
cacaatccagtgtgtagctggtcgtaatgagca

SEQ ID NO: 378 - DNA, 29 bp, Rhinovirus
tgtgaagagccgcgtgtgctcatcttgag

SEQ ID NO: 379 - DNA, 35 bp, Rhinovirus
tccacaagggcaaaaacaactgagatcgttatccg

SEQ ID NO: 380 - DNA, 32 bp, Rhinovirus
acctggtagatgaggctagagattcccctccg

SEQ ID NO: 381 - DNA, 25 bp, Rhinovirus
gttctagcctgcgtggctgcctgca

SEQ ID NO: 382 - DNA, 32 bp, Rhinovirus
actgggtgtgaagccaagtattggacaaggtg

SEQ ID NO: 383 - DNA, 34 bp, Rhinovirus
gattgatacgctccaacagggcgaaaacagatct

SEQ ID NO: 384 - DNA, 31 bp, Rhinovirus
atcgttatccgcaagatgcctacgcaaagct

SEQ ID NO: 385 - DNA, 33 bp, Rhinovirus
tatccgcaagatgcctacgcaaagcttagtagc

SEQ ID NO: 386 - DNA, 40 bp, Human metapneumovirus
tagaatggacatcccaaaaattgccagatccttctatgac

SEQ ID NO: 387 - DNA, 40 bp, Human metapneumovirus
gaagtttgttcattgagtatggcaaagcattaggctcatc

SEQ ID NO: 388 - DNA, 37 bp, Human metapneumovirus
tggacatcccaaaaattgccagatccttctatgactt

SEQ ID NO: 389 - DNA, 44 bp, Respiratory syncytial virus
aataaaacgctacaagggcctaataccaaaggatatagctaaca

SEQ ID NO: 390 - DNA, 44 bp, Respiratory syncytial virus
actgtgggatgataatactgtgtatagctgctcttgtaataacc

SEQ ID NO: 391 - DNA, 39 bp, Respiratory syncytial virus
aacgctacaagggcctaataccaaaggatatagctaaca

SEQ ID NO: 392 - DNA, 38 bp, Respiratory syncytial virus
tccagactgtgggatgataatactgtgtatagctgctc

SEQ ID NO: 393 - DNA, 40 bp, Respiratory syncytial virus
gactctccagactgtgggatgataatactgtgtatagctg

SEQ ID NO: 394 - DNA, 42 bp, Respiratory syncytial virus
gaaataaaacgctacaagggcctaataccaaaggatatagct

SEQ ID NO: 395 - DNA, 42 bp, Respiratory syncytial virus
gctacaagggcctaataccaaaggatatagctaacagttttt

SEQ ID NO: 396 - DNA, 41 bp, Respiratory syncytial virus
aaaacgctacaagggcctaataccaaaggatatagctaaca

SEQ ID NO: 397 - DNA, 35 bp, Respiratory syncytial virus
ttgcaggattgtttatgaatgcctatggtgcaggg

SEQ ID NO: 398 - DNA, 30 bp, Respiratory syncytial virus
tgaatgcctatggtgcagggcaagtgatgt

SEQ ID NO: 399 - DNA, 36 bp, Respiratory syncytial virus
gtagtaggccatgtgaattccctgcatcaataccag

SEQ ID NO: 400 - DNA, 32 bp, Respiratory syncytial virus
aggccatgtgaattccctgcatcaataccagc

SEQ ID NO: 401 - DNA, 34 bp, Respiratory syncytial virus
aacagtcagtagtaggccatgtgaattccctgca

SEQ ID NO: 402 - DNA, 34 bp, Respiratory syncytial virus
agtaggccatgtgaattccctgcatcaataccag

SEQ ID NO: 403 - DNA, 45 bp, Respiratory syncytial virus
agaacaacagactactagagattaccagggaatttagtgttaatg

SEQ ID NO: 404 - DNA, 44 bp, Respiratory syncytial virus
tagagattaccagggaatttagtgttaatgcaggtgtaactaca

SEQ ID NO: 405 - DNA, 42 bp, Respiratory syncytial virus
actactagagattaccagggaatttagtgttaatgcaggtgt

SEQ ID NO: 406 - DNA, 44 bp, Respiratory syncytial virus
aacagactactagagattaccagggaatttagtgttaatgcagg

SEQ ID NO: 407 - DNA, 34 bp, Respiratory syncytial virus
tgacccattggtgttcccctctgatgaatttgac

SEQ ID NO: 408 - DNA, 42 bp, Respiratory syncytial virus
gacattttctaacgggtgtgattatgtatcaaataagggggt

SEQ ID NO: 409 - DNA, 42 bp, Respiratory syncytial virus
tcgtggaatcataaagacattttctaacgggtgtgattatgt

SEQ ID NO: 410 - DNA, 45 bp, Respiratory syncytial virus
caaaattatgacttcaaaaacagatgtaagcagctccgttatcac

SEQ ID NO: 411 - DNA, 41 bp, Respiratory syncytial virus
ttatgacttcaaaaacagatgtaagcagctccgttatcaca

SEQ ID NO: 412 - DNA, 35 bp, Respiratory syncytial virus
ccgttatcacatctctaggagccattgtgtcatgc

SEQ ID NO: 413 - DNA, 41 bp, Respiratory syncytial virus
tagaaggggaagtgaacaagatcaaaagtgctctactatcc

SEQ ID NO: 414 - DNA, 37 bp, Respiratory syncytial virus
tgttaatgcaggcgtaactacacctgtaagcacttac

SEQ ID NO: 415 - DNA, 34 bp, Respiratory syncytial virus
gtcctgcacctagaaggggaagtgaacaagatca

SEQ ID NO: 416 - DNA, 45 bp, Respiratory syncytial virus
aacaacagactactagagattaccagggaatttagtgttaatgca

SEQ ID NO: 417 - DNA, 40 bp, Respiratory syncytial virus
cacaaacaaggctgtagtcagcttatcaaatggagttagt

SEQ ID NO: 418 - DNA, 40 bp, Respiratory syncytial virus
tactagagattaccagggaatttagtgttaatgcaggcgt

SEQ ID NO: 419 - DNA, 39 bp, Respiratory syncytial virus
gagattaccagggaatttagtgttaatgcaggcgtaact

SEQ ID NO: 420 - DNA, 43 bp, Respiratory syncytial virus
cagactactagagattaccagggaatttagtgttaatgcaggc

SEQ ID NO: 421 - DNA, 39 bp, Respiratory syncytial virus
taccagggaatttagtgttaatgcaggcgtaactacacc

SEQ ID NO: 422 - DNA, 41 bp, Respiratory syncytial virus
tagagattaccagggaatttagtgttaatgcaggcgtaact

SEQ ID NO: 423 - DNA, 40 bp, Respiratory syncytial virus
attaccagggaatttagtgttaatgcaggcgtaactacac

SEQ ID NO: 424 - DNA, 41 bp, Respiratory syncytial virus
actactagagattaccagggaatttagtgttaatgcaggcg

SEQ ID NO: 425 - DNA, 37 bp, Respiratory syncytial virus
cagggaatttagtgttaatgcaggcgtaactacacct

SEQ ID NO: 426 - DNA, 34 bp, Herpes simplex virus
ggggttagggagttgttcggtcataagcttcagc

SEQ ID NO: 427 - DNA, 31 bp, Herpes simplex virus
agttgttcggtcataagcttcagcgcgaacg

SEQ ID NO: 428 - DNA, 31 bp, Herpes simplex virus
tcataagcttcagcgcgaacgaccaactacc

SEQ ID NO: 429 - DNA, 35 bp, Herpes simplex virus
ctttaaaaagcaggggttagggagttgttcggtca

SEQ ID NO: 430 - DNA, 34 bp, Herpes simplex virus
caccttatcgtttgtgtgtattgttgcgatggcg

SEQ ID NO: 431 - DNA, 32 bp, Herpes simplex virus
cagcaccgtcatccacaccttatcgtttgtgt

SEQ ID NO: 432 - DNA, 38 bp, SARS Coronavirus
atccatagtagctaccagaaatgccaccgttgttatcg

SEQ ID NO: 433 - DNA, 37 bp, SARS Coronavirus
ctgaaatccatagtagctaccagaaatgccaccgttg

SEQ ID NO: 434 - DNA, 35 bp, SARS Coronavirus
cacgtacagtgggtggcgtctctttattagctact

SEQ ID NO: 435 - DNA, 35 bp, SARS Coronavirus
tagtagctaccagaaatgccaccgttgttatcggc

SEQ ID NO: 436 - DNA, 41 bp, SARS Coronavirus
caactgatggtaataagatagctgacaagtatgtccgcaat

SEQ ID NO: 437 - DNA, 43 bp, SARS Coronavirus
tctttcaactgatggtaataagatagctgacaagtatgtccgc

SEQ ID NO: 438 - DNA, 40 bp, SARS Coronavirus
ctgttacagccaatgtaaatgcacttctttcaactgatgg

SEQ ID NO: 439 - DNA, 42 bp, SARS Coronavirus
tctacaacacaggctctatgagtgtctctatagaaataggga

SEQ ID NO: 440 - DNA, 42 bp, SARS Coronavirus
aacacaggctctatgagtgtctctatagaaatagggatgttg

SEQ ID NO: 441 - DNA, 39 bp, SARS Coronavirus
cgcaatctacaacacaggctctatgagtgtctctataga

SEQ ID NO: 442 - DNA, 35 bp, SARS Coronavirus
ttgtttgcaggtttgacacacgtacacgatctaca

SEQ ID NO: 443 - DNA, 34 bp, SARS Coronavirus
atgtttatcacccgcgaagaagctattcgtcacg

SEQ ID NO: 444 - DNA, 34 bp, SARS Coronavirus
atgtagagggctgtcatgcaactagagatgctgt

SEQ ID NO: 445 - DNA, 36 bp, SARS Coronavirus
ctttgatgtagagggctgtcatgcaactagagatgc

SEQ ID NO: 446 - DNA, 33 bp, SARS Coronavirus
tatcacccgcgaagaagctattcgtcacgttcg

SEQ ID NO: 447 - DNA, 36 bp, SARS Coronavirus
ctgtgggtactaacctacctctccagctaggatttt

SEQ ID NO: 448 - DNA, 38 bp, SARS Coronavirus
aacacttgctgtaacttatcacaccgtttctacaggtt

SEQ ID NO: 449 - DNA, 28 bp, Epstein-Barr virus
agcagtacgagtgcctgcgaccagatcg

SEQ ID NO: 450 - DNA, 39 bp, Human herpes virus
ttggaaagaccgaaaatagatcttgcactttacttccca

SEQ ID NO: 451 - DNA, 28 bp, Human herpes virus
cctcagcaactggggcacgctattctgc

SEQ ID NO: 452 - DNA, 32 bp, Pan bacteria
agggtttccgccctttagtgctgaagttaacg

SEQ ID NO: 453 - DNA, 31 bp, Pan bacteria
agagatagggcttctccttcgggagcagagt

SEQ ID NO: 454 - DNA, 37 bp, Pan bacteria
tagttgccatcattaagttgggcactttaaggtgact

SEQ ID NO: 455 - DNA, 37 bp, Chlamydia
ggaacaaagtctgcgaccatcaattatcatgaatggc

SEQ ID NO: 456 - DNA, 39 bp, Chlamydia
atcatgaatggcaagtaggagcctctctatcttacagac

SEQ ID NO: 457 - DNA, 37 bp, Chlamydia
ctgcgaccatcaattatcatgaatggcaagtaggagc

SEQ ID NO: 458 - DNA, 30 bp, Chlamydia
atgggaatgcggttgtgcaactttgggagc

SEQ ID NO: 459 - DNA, 31 bp, Chlamydia
gccttatgggaatgcggttgtgcaactttgg

SEQ ID NO: 460 - DNA, 31 bp, Chlamydia
ataaaggcgttgctttccccttgccaacaga

SEQ ID NO: 461 - DNA, 39 bp, Chlamydia
agctgaattccaatatgcacagtccaaacctaaagttga

SEQ ID NO: 462 - DNA, 35 bp, Chlamydia
ttgggagctgaattccaatatgcacagtccaaacc

SEQ ID NO: 463 - DNA, 25 bp, Chlamydia
atggctgtcgtcagctcgtgccgtg

SEQ ID NO: 464 - DNA, 29 bp, Chlamydia
gccataacgccgtgaatacgttctcgggc

SEQ ID NO: 465 - DNA, 29 bp, Chlamydia
atacgttctcgggccttgtacacaccgcc

SEQ ID NO: 466 - DNA, 28 bp, Chlamydia
ttgtacacaccgcccgtcacatcatggg

SEQ ID NO: 467 - DNA, 37 bp, Chlamydia
gtagcaagatcgtgagatggagcaaatcctaaaagct

SEQ ID NO: 468 - DNA, 30 bp, Chlamydia
gcaaggacagatacacaggtgctgcatggc

SEQ ID NO: 469 - DNA, 33 bp, Chlamydia
ctagccccagttcggattgtagtctgcaactcg

SEQ ID NO: 470 - DNA, 31 bp, Chlamydia
cgtgaatacgttctcgggccttgtacacacc

SEQ ID NO: 471 - DNA, 35 bp, Mycoplasma
cacttcaggggacaacttgacgaattacaccaacc

SEQ ID NO: 472 - DNA, 34 bp, Mycoplasma
gcagcagggcagttcttcaggtacaactaattcc

SEQ ID NO: 473 - DNA, 34 bp, Mycoplasma
ggacaaagtgacgaaaaccacaccaagttcacga

SEQ ID NO: 474 - DNA, 35 bp, Mycoplasma
aggttgataaaagtggtgattcggtaacggttgca

SEQ ID NO: 475 - DNA, 34 bp, Mycoplasma
gtgattcggtaacggttgcagaaaccacttcagg

SEQ ID NO: 476 - DNA, 27 bp, Mycoplasma
ccaccaactacaccaacctccccccca

SEQ ID NO: 477 - DNA, 28 bp, Mycoplasma
agaggccaccaactacaccaacctcccc

SEQ ID NO: 478 - DNA, 31 bp, Mycoplasma
caacaagaggccaccaactacaccaacctcc

SEQ ID NO: 479 - DNA, 31 bp, Mycoplasma
gatgagggtgcgccatatcagctagttggtg

SEQ ID NO: 480 - DNA, 35 bp, Mycoplasma
tatttgatgagggtgcgccatatcagctagttggt

SEQ ID NO: 481 - DNA, 31 bp, Mycoplasma
caatgagcgaaagcttgatggagcaatgccg

SEQ ID NO: 482 - DNA, 33 bp, Mycoplasma
cctaccaaggcaatgacgtgtagctatgctgag

SEQ ID NO: 483 - DNA, 36 bp, Streptococcus
aatcccctgcttcagccgccataaaaatatctttgc

SEQ ID NO: 484 - DNA, 40 bp, Streptococcus
actaagggacagattaggtttgaggggattgatattaccg

SEQ ID NO: 485 - DNA, 35 bp, Streptococcus
accatctattcaagtaaggagtcttgcttgcccga

SEQ ID NO: 486 - DNA, 32 bp, Streptococcus
gcggttgttgaaaaggttatgggagtgcagga

SEQ ID NO: 487 - DNA, 33 bp, Streptococcus
atcgagattattggtcaagcaggggcacaagtc

SEQ ID NO: 488 - DNA, 45 bp, Streptococcus
cggcaattttattgatgagtaaagaaaaagctgaagaattagggc

SEQ ID NO: 489 - DNA, 41 bp, Bacillus anthracis
tcctggaacaataactccaataccacggaattcaaaaatct

SEQ ID NO: 490 - DNA, 42 bp, Bacillus anthracis
tccaataccacggaattcaaaaatctcaaatggcataacagg

SEQ ID NO: 491 - DNA, 41 bp, Bacillus anthracis
tgccgcaaattttctacggccatataaaatcatgaatcttg

SEQ ID NO: 492 - DNA, 43 bp, Bacillus anthracis
acggccatataaaatcatgaatcttgaaacaccatacgtaacg

SEQ ID NO: 493 - DNA, 38 bp, Bacillus anthracis
gacttggaatagcttgctgatacggtatagaacctggc

SEQ ID NO: 494 - DNA, 41 bp, Bacillus anthracis
gctgatacggtatagaacctggcattaaaagactcattgag

SEQ ID NO: 495 - DNA, 25 bp, Influenza A
cctctgactaaggggattttagggt

SEQ ID NO: 496 - DNA, 25 bp, Influenza A
ggatgtcaaaaatgcaattggggtc

SEQ ID NO: 497 - DNA, 22 bp, Influenza A
tggcgaaatttcaccattgcct

SEQ ID NO: 498 - DNA, 23 bp, Influenza A
aatgcaattggggtcctcatcgg

SEQ ID NO: 499 - DNA, 24 bp, Influenza A
aaaatgcaattggggtcctcatcg

SEQ ID NO: 500 - DNA, 26 bp, Influenza A
cacctctgactaaggggattttagga

SEQ ID NO: 501 - DNA, 24 bp, Influenza A
cagggaagaacaccgatcttgagg

SEQ ID NO: 502 - DNA, 23 bp, Influenza A
ctttgcagggaagaacaccgatc

SEQ ID NO: 503 - DNA, 24 bp, Influenza A
atcttgaggcactcatggaatggc

SEQ ID NO: 504 - DNA, 22 bp, Influenza A
atggcgagaacagctaggtcaa

SEQ ID NO: 505 - DNA, 24 bp, Influenza A
ctttcaccgaagagggagcaattg

SEQ ID NO: 506 - DNA, 28 bp, Influenza B
agctccataatagctgacatgattgtat

SEQ ID NO: 507 - DNA, 26 bp, Influenza B
ggaacattcctcaaacatcccaatgg

SEQ ID NO: 508 - DNA, 28 bp, Influenza B
gatgatcttacagtggaggatgaagaag

SEQ ID NO: 509 - DNA, 25 bp, Influenza B
actcttcgagcgtcttaatgaagga

SEQ ID NO: 510 - DNA, 22 bp, Influenza B
tcctcaactcactcttcgagcg

SEQ ID NO: 511 - DNA, 24 bp, Influenza B
aaggacatccaaagccaattcgag

SEQ ID NO: 512 - DNA, 23 bp, Influenza B
gcatatgaccagagtggaaggct

SEQ ID NO: 513 - DNA, 23 bp, Influenza B
catccaaagccaattcgagcagc

SEQ ID NO: 514 - DNA, 24 bp, Influenza B
tgaaggacatccaaagccaattcg

SEQ ID NO: 515 - DNA, 23 bp, Influenza B
gacatccaaagccaattcgagca

SEQ ID NO: 516 - DNA, 28 bp, Influenza B
attatcaccagaagagggagacaattag

SEQ ID NO: 517 - DNA, 26 bp, Influenza B
tcactcttcgagcgtcttaatgaagg

SEQ ID NO: 518 - DNA, 25 bp, Influenza B
tgaaggacattcaaagccaattcga

SEQ ID NO: 519 - DNA, 24 bp, Influenza B
gacattcaaagccaattcgagcag

SEQ ID NO: 520 - DNA, 29 bp, Influenza B
gctaaacttgttgctactgatgatcttac

SEQ ID NO: 521 - DNA, 27 bp, Influenza B
tgatcttacagtggaggatgaagaaga

SEQ ID NO: 522 - DNA, 26 bp, Influenza B
ctcactcttcgagcgtcttaatgaag

SEQ ID NO: 523 - DNA, 23 bp, Influenza B
ctcaactcactcttcgagcgtct

SEQ ID NO: 524 - DNA, 23 bp, Influenza B
ggacatccaaagccaattcgagc

SEQ ID NO: 525 - DNA, 23 bp, Influenza B
ccaaataagttgcagcccagtgt

SEQ ID NO: 526 - DNA, 25 bp, Parainfluenza virus
tctgataggccaaagattgttgtcg

SEQ ID NO: 527 - DNA, 27 bp, Parainfluenza virus
cctaagtgatggaatcaatcgcaaaag

SEQ ID NO: 528 - DNA, 28 bp, Parainfluenza virus
atttacctaagtgatggaatcaatcgca

SEQ ID NO: 529 - DNA, 26 bp, Parainfluenza virus
aactcccaaggttgatgaaagatcag

SEQ ID NO: 530 - DNA, 29 bp, Parainfluenza virus
cgtatctattaagccgaagcaaataaagg

SEQ ID NO: 531 - DNA, 27 bp, Parainfluenza virus
ctttacctggcgagttcagatactatc

SEQ ID NO: 532 - DNA, 27 bp, Parainfluenza virus
atcaaaacaaaaggtacagaacaccag

SEQ ID NO: 533 - DNA, 29 bp, Parainfluenza virus
gcctcataccaaaaatagaagactctaac

SEQ ID NO: 534 - DNA, 25 bp, Parainfluenza virus
ccggacgtatctattaagccgaagc

SEQ ID NO: 535 - DNA, 24 bp, Parainfluenza virus
cctggcgagttcagatactatcct

SEQ ID NO: 536 - DNA, 30 bp, Parainfluenza virus
tctgccaaatagatatcacaaaactacagc

SEQ ID NO: 537 - DNA, 27 bp, Parainfluenza virus
agatatcacaaaactacagcacgtagg

SEQ ID NO: 538 - DNA, 26 bp, Parainfluenza virus
agtcccaaagggatgaagatatcaca

SEQ ID NO: 539 - DNA, 25 bp, Parainfluenza virus
aaactacagcacgtaggtgtattgg

SEQ ID NO: 540 - DNA, 23 bp, Parainfluenza virus
gcaacacaacaagcactgaacac

SEQ ID NO: 541 - DNA, 25 bp, Parainfluenza virus
cactcgcaagaataagagagaaggg

SEQ ID NO: 542 - DNA, 26 bp, Parainfluenza virus
agtcacactcgcaagaataagagaga

SEQ ID NO: 543 - DNA, 28 bp, Parainfluenza virus
gttaggctaccttcattatcaattggtg

SEQ ID NO: 544 - DNA, 27 bp, Parainfluenza virus
gctaccttcattatcaattggtgatgc

SEQ ID NO: 545 - DNA, 26 bp, Parainfluenza virus
agggaaagaccaaatctcatcgatac

SEQ ID NO: 546 - DNA, 29 bp, Parainfluenza virus
acagactactcaagtgaaggtatagaaga

SEQ ID NO: 547 - DNA, 28 bp, Parainfluenza virus
aaagatggctaaatatcaacaacaaggg

SEQ ID NO: 548 - DNA, 27 bp, Parainfluenza virus
aacaagggagaatcaatgctaggtatg

SEQ ID NO: 549 - DNA, 28 bp, Parainfluenza virus
gggagaatcaatgctaggtatgtactac

SEQ ID NO: 550 - DNA, 25 bp, Parainfluenza virus
tgcttatgcaggcatggatagtaac

SEQ ID NO: 551 - DNA, 28 bp, Parainfluenza virus
cacacatttgggtatccatcatgtttag

SEQ ID NO: 552 - DNA, 27 bp, Parainfluenza virus
atttgggtatccatcatgtttaggagc

SEQ ID NO: 553 - DNA, 24 bp, Parainfluenza virus
aggctttttcactcgattagaggc

SEQ ID NO: 554 - DNA, 27 bp, Parainfluenza virus
ttcatattggtctacaacccgaaatga

SEQ ID NO: 555 - DNA, 25 bp, Parainfluenza virus
gttcagtcactgctataccaggagg

SEQ ID NO: 556 - DNA, 25 bp, Parainfluenza virus
gccatcctaaacagaacactctcag

SEQ ID NO: 557 - DNA, 22 bp, Parainfluenza virus
ccgagagagtaaacgagctggc

SEQ ID NO: 558 - DNA, 25 bp, Parainfluenza virus
tcagaagtttaaacaaagggccaga

SEQ ID NO: 559 - DNA, 27 bp, Parainfluenza virus
aagtctcagaagtttaaacaaagggcc

SEQ ID NO: 560 - DNA, 24 bp, Parainfluenza virus
agtttaaacaaagggccagagcaa

SEQ ID NO: 561 - DNA, 25 bp, Adenovirus
attgtcaaagatcttggttgtgggc

SEQ ID NO: 562 - DNA, 23 bp, Adenovirus
caaagatcttggttgtgggccat

SEQ ID NO: 563 - DNA, 24 bp, Adenovirus
gtttgaagtctttgacgtggtccg

SEQ ID NO: 564 - DNA, 22 bp, Adenovirus
aagtctttgacgtggtccgtgt

SEQ ID NO: 565 - DNA, 23 bp, Adenovirus
cgtcatcgaaaccgtgtacctgc

SEQ ID NO: 566 - DNA, 26 bp, Adenovirus
tttgtttgaagtctttgacgtggtcc

SEQ ID NO: 567 - DNA, 23 bp, Adenovirus
ttgaagtctttgacgtggtccgt

SEQ ID NO: 568 - DNA, 25 bp, Adenovirus
caccctgggaaacaagtttaggaat

SEQ ID NO: 569 - DNA, 25 bp, Adenovirus
cacagacacctacttcaatctgggg

SEQ ID NO: 570 - DNA, 21 bp, Adenovirus
gagtccgggtctggtgcagtt

SEQ ID NO: 571 - DNA, 21 bp, Adenovirus
tcgagtccccttgaatcaggc

SEQ ID NO: 572 - DNA, 22 bp, Adenovirus
gccgcgactaacgtggtattgg

SEQ ID NO: 573 - DNA, 22 bp, Adenovirus
cgtggggttatcgacaaggaca

SEQ ID NO: 574 - DNA, 28 bp, Adenovirus
ccacccttctttatgttttgtttgaagt

SEQ ID NO: 575 - DNA, 27 bp, Adenovirus
aggtggttgatgaggttaattacactg

SEQ ID NO: 576 - DNA, 27 bp, Adenovirus
tatcttgcacctactatgagacaaggg

SEQ ID NO: 577 - DNA, 24 bp, Adenovirus
cctgggacagaacatgctctatgc

SEQ ID NO: 578 - DNA, 23 bp, Adenovirus
ccttctccagcaacttcatgtcc

SEQ ID NO: 579 - DNA, 23 bp, Adenovirus
atgcgctggacatgacttttgag

SEQ ID NO: 580 - DNA, 25 bp, Adenovirus
ggatacaaggatcgcatgtactcct

SEQ ID NO: 581 - DNA, 25 bp, Adenovirus
ctggacatgacttttgaggtggatc

SEQ ID NO: 582 - DNA, 24 bp, Adenovirus
ctgagggatacaaggatcgcatgt

SEQ ID NO: 583 - DNA, 26 bp, Enterovirus
gctgcttatggtgacaattgaaaagt

SEQ ID NO: 584 - DNA, 25 bp, Enterovirus
tactggctgcttatggtgacaattg

SEQ ID NO: 585 - DNA, 23 bp, Enterovirus
ctttgggtgtccgtgtttccttt

SEQ ID NO: 586 - DNA, 24 bp, Enterovirus
gactactttgggtgtccgtgtttc

SEQ ID NO: 587 - DNA, 25 bp, Enterovirus
aacctagtagcaccatgaaagttgc

SEQ ID NO: 588 - DNA, 26 bp, Enterovirus
cgagaaacctagtagcaccatgaaag

SEQ ID NO: 589 - DNA, 24 bp, Enterovirus
cccggctaactacttcgagaaacc

SEQ ID NO: 590 - DNA, 23 bp, Enterovirus
cgttacccggctaactacttcga

SEQ ID NO: 591 - DNA, 24 bp, Enterovirus
ctactttgggtgtccgtgtttctt

SEQ ID NO: 592 - DNA, 23 bp, Enterovirus
gctaatcctaaccacggagcaac

SEQ ID NO: 593 - DNA, 25 bp, Enterovirus
gggtgtccgtgtttccctttatatt

SEQ ID NO: 594 - DNA, 27 bp, Enterovirus
tacttcaagaaacctagtagcaccatg

SEQ ID NO: 595 - DNA, 27 bp, Enterovirus
caagaaacctagtagcaccatgaaagt

SEQ ID NO: 596 - DNA, 25 bp, Enterovirus
aacctagtagcaccatgaaagtcgc

SEQ ID NO: 597 - DNA, 25 bp, Enterovirus
gacgctctaatacagacatggtgtg

SEQ ID NO: 598 - DNA, 23 bp, Enterovirus
cgtgtagatcaggtcgatgagcc

SEQ ID NO: 599 - DNA, 27 bp, Enterovirus
tgcagtgtggaagatcacttataaaga

SEQ ID NO: 600 - DNA, 27 bp, Enterovirus
aaatttcactgagactaacaatgggca

SEQ ID NO: 601 - DNA, 25 bp, Enterovirus
cataggtcaaggtcagagtctagca

SEQ ID NO: 602 - DNA, 26 bp, Enterovirus
tggttactgcaaatttcactgagact

SEQ ID NO: 603 - DNA, 31 bp, Enterovirus
cacctattctagatttgatatggaacttacc

SEQ ID NO: 604 - DNA, 28 bp, Enterovirus
ccaccacgaataaggataagctatttgc

SEQ ID NO: 605 - DNA, 25 bp, Rhinovirus
tgaatgtggctaaccttaaacctgc

SEQ ID NO: 606 - DNA, 26 bp, Rhinovirus
aaaaacaactgagatcgttatccgca

SEQ ID NO: 607 - DNA, 24 bp, Rhinovirus
ccggtcaaagttgatatgctccac

SEQ ID NO: 608 - DNA, 25 bp, Rhinovirus
gcctacgcaaagcctagtaatacat

SEQ ID NO: 609 - DNA, 23 bp, Rhinovirus
aagatgcctacgcaaagcctagt

SEQ ID NO: 610 - DNA, 25 bp, Rhinovirus
gtagacctggtagatgaggctagag

SEQ ID NO: 611 - DNA, 25 bp, Rhinovirus
cctggtagatgaggctagagattcc

SEQ ID NO: 612 - DNA, 26 bp, Rhinovirus
atccagattgtcaaagatcaagcact

SEQ ID NO: 613 - DNA, 24 bp, Rhinovirus
agggcaaaaacaactgagatcgtt

SEQ ID NO: 614 - DNA, 23 bp, Rhinovirus
caagatgcctacgcaaagcctag

SEQ ID NO: 615 - DNA, 25 bp, Rhinovirus
agtagacctggtagatgaggctaga

SEQ ID NO: 616 - DNA, 25 bp, Rhinovirus
acctggtagatgaggctagagattc

SEQ ID NO: 617 - DNA, 24 bp, Rhinovirus
aagggcaaaaacaactgagatcgt

SEQ ID NO: 618 - DNA, 26 bp, Rhinovirus
caaaaacaactgagatcgttatccgc

SEQ ID NO: 619 - DNA, 23 bp, Rhinovirus
aacctggcagatgaggctagaag

SEQ ID NO: 620 - DNA, 25 bp, Rhinovirus
tagtaaacctggcagatgaggctag

SEQ ID NO: 621 - DNA, 23 bp, Rhinovirus
ctccaacagggcgaaaacagatc

SEQ ID NO: 622 - DNA, 28 bp, Human metapneumovirus
gaagtttgttcattgagtatggcaaagc

SEQ ID NO: 623 - DNA, 24 bp, Human metapneumovirus
tggacatcccaaaaattgccagat

SEQ ID NO: 624 - DNA, 25 bp, Human metapneumovirus
atcccaaaaattgccagatccttct

SEQ ID NO: 625 - DNA, 25 bp, Respiratory syncytial virus
tcttacagcagtaattaggagggca

SEQ ID NO: 626 - DNA, 27 bp, Respiratory syncytial virus
tcaggtcttacagcagtaattaggagg

SEQ ID NO: 627 - DNA, 24 bp, Respiratory syncytial virus
cagcagtaattaggagggcaaaca

SEQ ID NO: 628 - DNA, 26 bp, Respiratory syncytial virus
agtagagttgaaggaatcttcgcagg

SEQ ID NO: 629 - DNA, 23 bp, Respiratory syncytial virus
gcagcaggagatagatcaggtct

SEQ ID NO: 630 - DNA, 27 bp, Respiratory syncytial virus
cagtaattaggagggcaaacaatgtct

SEQ ID NO: 631 - DNA, 28 bp, Respiratory syncytial virus
gatcaggtcttacagcagtaattaggag

SEQ ID NO: 632 - DNA, 25 bp, Respiratory syncytial virus
tacagcagtaattaggagggcaaac

SEQ ID NO: 633 - DNA, 21 bp, Respiratory syncytial virus
tgaatgcctatggtgcagggc

SEQ ID NO: 634 - DNA, 25 bp, Respiratory syncytial virus
gtttatgaatgcctatggtgcaggg

SEQ ID NO: 635 - DNA, 25 bp, Respiratory syncytial virus
gtagtaggccatgtgaattccctgc

SEQ ID NO: 636 - DNA, 25 bp, Respiratory syncytial virus
tcagtagtaggccatgtgaattccc

SEQ ID NO: 637 - DNA, 25 bp, Respiratory syncytial virus
gtgaattccctgcatcaataccagc

SEQ ID NO: 638 - DNA, 31 bp, Respiratory syncytial virus
acaaaagaacaacagactactagagattacc

SEQ ID NO: 639 - DNA, 25 bp, Respiratory syncytial virus
cattggtgttcccctctgatgaatt

SEQ ID NO: 640 - DNA, 29 bp, Respiratory syncytial virus
aacgggtgtgattatgtatcaaataaggg

SEQ ID NO: 641 - DNA, 25 bp, Respiratory syncytial virus
cagctccgttatcacatctctagga

SEQ ID NO: 642 - DNA, 28 bp, Respiratory syncytial virus
taaatttctatgacccattggtgttccc

SEQ ID NO: 643 - DNA, 24 bp, Respiratory syncytial virus
ccgttatcacatctctaggagcca

SEQ ID NO: 644 - DNA, 25 bp, Respiratory syncytial virus
atctctaggagccattgtgtcatgc

SEQ ID NO: 645 - DNA, 28 bp, Respiratory syncytial virus
aacaacagactactagagattaccaggg

SEQ ID NO: 646 - DNA, 23 bp, Respiratory syncytial virus
ctaaggtcctgcacctagaaggg

SEQ ID NO: 647 - DNA, 27 bp, Respiratory syncytial virus
ctctactatccacaaacaaggctgtag

SEQ ID NO: 648 - DNA, 28 bp, Respiratory syncytial virus
tgatagagttccaacaaaagaacaacag

SEQ ID NO: 649 - DNA, 26 bp, Respiratory syncytial virus
ggggaagtgaacaagatcaaaagtgc

SEQ ID NO: 650 - DNA, 30 bp, Respiratory syncytial virus
catgtccataataaaagaggaagtcttagc

SEQ ID NO: 651 - DNA, 27 bp, Respiratory syncytial virus
tagaaggggaagtgaacaagatcaaaa

SEQ ID NO: 652 - DNA, 28 bp, Respiratory syncytial virus
gactgtgatagagttccaacaaaagaac

SEQ ID NO: 653 - DNA, 23 bp, Respiratory syncytial virus
ggcgtaactacacctgtaagcac

SEQ ID NO: 654 - DNA, 30 bp, Respiratory syncytial virus
actactagagattaccagggaatttagtgt

SEQ ID NO: 655 - DNA, 29 bp, Respiratory syncytial virus
agaacaacagactactagagattaccagg

SEQ ID NO: 656 - DNA, 28 bp, Respiratory syncytial virus
tgtgatagagttccaacaaaagaacaac

SEQ ID NO: 657 - DNA, 24 bp, Respiratory syncytial virus
caggcgtaactacacctgtaagca

SEQ ID NO: 658 - DNA, 25 bp, Herpes simplex virus
aagtctgtctttaaaaagcaggggt

SEQ ID NO: 659 - DNA, 25 bp, Herpes simplex virus
tgtctttaaaaagcaggggttaggg

SEQ ID NO: 660 - DNA, 23 bp, Herpes simplex virus
gaccaactaccccgatcatcagt

SEQ ID NO: 661 - DNA, 25 bp, Herpes simplex virus
ctttaaaaagcaggggttagggagt

SEQ ID NO: 662 - DNA, 21 bp, Herpes simplex virus
cgggcaaggactacctggaga

SEQ ID NO: 663 - DNA, 22 bp, Herpes simplex virus
ctacctggagatcgaggtgggg

SEQ ID NO: 664 - DNA, 22 bp, Herpes simplex virus
gtgtattgttgcgatggcgaca

SEQ ID NO: 665 - DNA, 21 bp, Herpes simplex virus
ttgttgcgatggcgacacacc

SEQ ID NO: 666 - DNA, 27 bp, SARS Coronavirus
cgatgttgatgatcctaaattgatggg

SEQ ID NO: 667 - DNA, 30 bp, SARS Coronavirus
ctactatgactacaagacagtttcatcaga

SEQ ID NO: 668 - DNA, 26 bp, SARS Coronavirus
atggccgatgttgatgatcctaaatt

SEQ ID NO: 669 - DNA, 25 bp, SARS Coronavirus
gggtggcgtctctttattagctact

SEQ ID NO: 670 - DNA, 26 bp, SARS Coronavirus
ggctcactatatgttaaaccaggtgg

SEQ ID NO: 671 - DNA, 23 bp, SARS Coronavirus
catgtgtggcggctcactatatg

SEQ ID NO: 672 - DNA, 25 bp, SARS Coronavirus
gtggcggctcactatatgttaaacc

SEQ ID NO: 673 - DNA, 28 bp, SARS Coronavirus
caagtattaagtgagatggtcatgtgtg

SEQ ID NO: 674 - DNA, 22 bp, SARS Coronavirus
gtgagatggtcatgtgtggcgg

SEQ ID NO: 675 - DNA, 25 bp, SARS Coronavirus
attaagtgagatggtcatgtgtggc

SEQ ID NO: 676 - DNA, 25 bp, SARS Coronavirus
ctcaattgtttgcaggtttgacaca

SEQ ID NO: 677 - DNA, 23 bp, SARS Coronavirus
aggcataccaaaggacatgacct

SEQ ID NO: 678 - DNA, 27 bp, SARS Coronavirus
cctaccgtagactcatctctatgatgg

SEQ ID NO: 679 - DNA, 28 bp, SARS Coronavirus
ttaccaagtcaatggttaccctcatatg

SEQ ID NO: 680 - DNA, 28 bp, SARS Coronavirus
aatggttaccctcatatgtttatcaccc

SEQ ID NO: 681 - DNA, 24 bp, SARS Coronavirus
ctttgatgtagagggctgtcatgc

SEQ ID NO: 682 - DNA, 26 bp, SARS Coronavirus
ttatcacaccgtttctacaggttagc

SEQ ID NO: 683 - DNA, 27 bp, Human herpes virus
gtgcattggaaagaccgaaaatagatc

SEQ ID NO: 684 - DNA, 24 bp, Pan bacteria
tctggtctgtaactgacactgagg

SEQ ID NO: 685 - DNA, 24 bp, Pan bacteria
ccctttagtgctgaagttaacgca

SEQ ID NO: 686 - DNA, 28 bp, Pan bacteria
tgacatcctttgaaaaccctagagatag

SEQ ID NO: 687 - DNA, 24 bp, Pan bacteria
agttgggcactttaaggtgactgc

SEQ ID NO: 688 - DNA, 24 bp, Chlamydia
aagggctataaaggcgttgctttc

SEQ ID NO: 689 - DNA, 27 bp, Chlamydia
tgaattccaatatgcacagtccaaacc

SEQ ID NO: 690 - DNA, 26 bp, Chlamydia
ctttgggagctgaattccaatatgca

SEQ ID NO: 691 - DNA, 25 bp, Chlamydia
ggagctgaattccaatatgcacagt

SEQ ID NO: 692 - DNA, 23 bp, Chlamydia
tgcaactttgggagctgaattcc

SEQ ID NO: 693 - DNA, 23 bp, Chlamydia
gggctataaaggcgttgctttcc

SEQ ID NO: 694 - DNA, 25 bp, Chlamydia
ttgggagctgaattccaatatgcac

SEQ ID NO: 695 - DNA, 25 bp, Chlamydia
agctgaattccaatatgcacagtcc

SEQ ID NO: 696 - DNA, 21 bp, Chlamydia
cacaccgcccgtcacatcatg

SEQ ID NO: 697 - DNA, 24 bp, Chlamydia
agcacttagggtgggaactctaac

SEQ ID NO: 698 - DNA, 25 bp, Chlamydia
agtacagaaggtagcaagatcgtga

SEQ ID NO: 699 - DNA, 25 bp, Chlamydia
agtctgcaactcgactacatgaagt

SEQ ID NO: 700 - DNA, 27 bp, Chlamydia
atcatgggagttggttttaccttaagt

SEQ ID NO: 701 - DNA, 25 bp, Chlamydia
gggagttggttttaccttaagtcgt

SEQ ID NO: 702 - DNA, 26 bp, Mycoplasma
gacaacttgacgaattacaccaacct

SEQ ID NO: 703 - DNA, 21 bp, Mycoplasma
cgggcaatcccgactcgttaa

SEQ ID NO: 704 - DNA, 23 bp, Mycoplasma
aatcccgactcgttaaagcagga

SEQ ID NO: 705 - DNA, 25 bp, Mycoplasma
caggggacaacttgacgaattacac

SEQ ID NO: 706 - DNA, 26 bp, Mycoplasma
agttcttcaggtacaactaattccgc

SEQ ID NO: 707 - DNA, 22 bp, Mycoplasma
ccaccaactacaccaacctccc

SEQ ID NO: 708 - DNA, 22 bp, Mycoplasma
agaggccaccaactacaccaac

SEQ ID NO: 709 - DNA, 23 bp, Mycoplasma
caacaagaggccaccaactacac

SEQ ID NO: 710 - DNA, 23 bp, Mycoplasma
cgccatatcagctagttggtggg

SEQ ID NO: 711 - DNA, 24 bp, Mycoplasma
ggaggcagcagtagggaatttttc

SEQ ID NO: 712 - DNA, 25 bp, Mycoplasma
gcgtgaacgatgaaggtctttaaga

SEQ ID NO: 713 - DNA, 24 bp, Mycoplasma
caaggcaatgacgtgtagctatgc

SEQ ID NO: 714 - DNA, 26 bp, Streptococcus
ttcagccgccataaaaatatctttgc

SEQ ID NO: 715 - DNA, 27 bp, Streptococcus
taccaactaagggacagattaggtttg

SEQ ID NO: 716 - DNA, 27 bp, Streptococcus
ctattcaagtaaggagtcttgcttgcc

SEQ ID NO: 717 - DNA, 25 bp, Streptococcus
tgttgaaaaggttatgggagtgcag

SEQ ID NO: 718 - DNA, 25 bp, Streptococcus
atcgagattattggtcaagcagggg

SEQ ID NO: 719 - DNA, 24 bp, Streptococcus
aaaagctgaagaattagggctccc

SEQ ID NO: 720 - DNA, 28 bp, Bacillus anthracis
taccacggaattcaaaaatctcaaatgg

SEQ ID NO: 721 - DNA, 23 bp, Bacillus anthracis
agcgttgccgcaaattttctacg

SEQ ID NO: 722 - DNA, 28 bp, Bacillus anthracis
gaacaataactccaataccacggaattc

SEQ ID NO: 723 - DNA, 22 bp, Bacillus anthracis
acctgtaattagcgttgccgca

SEQ ID NO: 724 - DNA, 27 bp, Bacillus anthracis
ggaatagcttgctgatacggtatagaa

SEQ ID NO: 725 - DNA, 25 bp, Bacillus anthracis
agcttgctgatacggtatagaacct

SEQ ID NO: 726 - DNA, 23 bp, Influenza A
cctctgactaaggggattttagg

SEQ ID NO: 727 - DNA, 21 bp, Influenza A
attgccttctcttccaggaca

SEQ ID NO: 728 - DNA, 21 bp, Influenza A
cgggggacttgaatggaatga

SEQ ID NO: 729 - DNA, 21 bp, Influenza A
aatgcaattggggtcctcatc

SEQ ID NO: 730 - DNA, 21 bp, Influenza A
aaaatgcaattggggtcctca

SEQ ID NO: 731 - DNA, 21 bp, Influenza A
caagaccaatcctgtcacctc

SEQ ID NO: 732 - DNA, 21 bp, Influenza A
atttgtgttcacgctcaccgt

SEQ ID NO: 733 - DNA, 21 bp, Influenza A
atcttgaggcactcatggaat

SEQ ID NO: 734 - DNA, 21 bp, Influenza A
aagaacaccgatcttgaggca

SEQ ID NO: 735 - DNA, 21 bp, Influenza A
atggcgagaacagctaggtca

SEQ ID NO: 736 - DNA, 21 bp, Influenza A
accgaagagggagcaattgtt

SEQ ID NO: 737 - DNA, 21 bp, Influenza B
tgggcagaccaacgtgtgtgg

SEQ ID NO: 738 - DNA, 22 bp, Influenza B
cagtggaggatgaagaagatgg

SEQ ID NO: 739 - DNA, 22 bp, Influenza B
gtcaagagcaccgattatcacc

SEQ ID NO: 740 - DNA, 25 bp, Influenza B
caatggatacaagtccttatcaact

SEQ ID NO: 741 - DNA, 22 bp, Influenza B
actcttcgagcgtcttaatgaa

SEQ ID NO: 742 - DNA, 22 bp, Influenza B
aaggacatccaaagccaattcg

SEQ ID NO: 743 - DNA, 22 bp, Influenza B
ccagaagagggagacaattaga

SEQ ID NO: 744 - DNA, 21 bp, Influenza B
tcgagcgtcttaatgaaggac

SEQ ID NO: 745 - DNA, 21 bp, Influenza B
gcatatgaccagagtggaagg

SEQ ID NO: 746 - DNA, 22 bp, Influenza B
caccgattatcaccagaagagg

SEQ ID NO: 747 - DNA, 22 bp, Influenza B
tcactcttcgagcgtcttaatg

SEQ ID NO: 748 - DNA, 22 bp, Influenza B
cttcgagcgtcttaatgaagga

SEQ ID NO: 749 - DNA, 22 bp, Influenza B
tgaaggacattcaaagccaatt

SEQ ID NO: 750 - DNA, 21 bp, Influenza B
caccagaagagggagacaatt

SEQ ID NO: 751 - DNA, 23 bp, Influenza B
gaagagggagacaattagactgg

SEQ ID NO: 752 - DNA, 21 bp, Influenza B
caagagcaccgattatcacca

SEQ ID NO: 753 - DNA, 24 bp, Influenza B
acttgttgctactgatgatcttac

SEQ ID NO: 754 - DNA, 21 bp, Influenza B
ctcactcttcgagcgtcttaa

SEQ ID NO: 755 - DNA, 23 bp, Influenza B
aacattcctcaaacatcccaatg

SEQ ID NO: 756 - DNA, 21 bp, Influenza B
tccaaagccaattcgagcagc

SEQ ID NO: 757 - DNA, 21 bp, Influenza B
tgcagcccagtgtttgcagta

SEQ ID NO: 758 - DNA, 21 bp, Influenza B
cccagtgtttgcagtagaaag

SEQ ID NO: 759 - DNA, 21 bp, Parainfluenza virus
taggccaaagattgttgtcga

SEQ ID NO: 760 - DNA, 23 bp, Parainfluenza virus
gtgatggaatcaatcgcaaaagc

SEQ ID NO: 761 - DNA, 24 bp, Parainfluenza virus
caccaggcatagaagatattgtac

SEQ ID NO: 762 - DNA, 21 bp, Parainfluenza virus
acaagcactgaacacaatgcc

SEQ ID NO: 763 - DNA, 21 bp, Parainfluenza virus
acagcacgtaggtgtattggt

SEQ ID NO: 764 - DNA, 21 bp, Parainfluenza virus
ggtgtattggtcaacagtccc

SEQ ID NO: 765 - DNA, 21 bp, Parainfluenza virus
attggtcaacagtcccaaagg

SEQ ID NO: 766 - DNA, 21 bp, Parainfluenza virus
ccggacgtatctattaagccg

SEQ ID NO: 767 - DNA, 24 bp, Parainfluenza virus
gggaaaatcaaacaatggaactag

SEQ ID NO: 768 - DNA, 22 bp, Parainfluenza virus
cctggcgagttcagatactatc

SEQ ID NO: 769 - DNA, 25 bp, Parainfluenza virus
caaagggatgaagatatcacaaaac

SEQ ID NO: 770 - DNA, 23 bp, Parainfluenza virus
agatatcacaaaactacagcacg

SEQ ID NO: 771 - DNA, 23 bp, Parainfluenza virus
agtcccaaagggatgaagatatc

SEQ ID NO: 772 - DNA, 21 bp, Parainfluenza virus
gcaacacaacaagcactgaac

SEQ ID NO: 773 - DNA, 23 bp, Parainfluenza virus
gcaagaataagagagaagggacc

SEQ ID NO: 774 - DNA, 23 bp, Parainfluenza virus
caaaacaaaaggtacagaacacc

SEQ ID NO: 775 - DNA, 23 bp, Parainfluenza virus
accaagtctactttctggatcaa

SEQ ID NO: 776 - DNA, 23 bp, Parainfluenza virus
gtctactttctggatcaaccaca

SEQ ID NO: 777 - DNA, 21 bp, Parainfluenza virus
ttgaccatcctttctctgcaa

SEQ ID NO: 778 - DNA, 22 bp, Parainfluenza virus
agggaaagaccaaatctcatcg

SEQ ID NO: 779 - DNA, 23 bp, Parainfluenza virus
aacaagggagaatcaatgctagg

SEQ ID NO: 780 - DNA, 23 bp, Parainfluenza virus
gggagaatcaatgctaggtatgt

SEQ ID NO: 781 - DNA, 21 bp, Parainfluenza virus
tgcttatgcaggcatggatag

SEQ ID NO: 782 - DNA, 21 bp, Parainfluenza virus
agtgtatgactgctcctgatc

SEQ ID NO: 783 - DNA, 22 bp, Parainfluenza virus
ttttggtcaaagccatcactag

SEQ ID NO: 784 - DNA, 23 bp, Parainfluenza virus
cacacatttgggtatccatcatg

SEQ ID NO: 785 - DNA, 21 bp, Parainfluenza virus
gtcaaagccatcactagcatc

SEQ ID NO: 786 - DNA, 22 bp, Parainfluenza virus
aacccgaaatgataactccacg

SEQ ID NO: 787 - DNA, 22 bp, Parainfluenza virus
gttcagtcactgctataccagg

SEQ ID NO: 788 - DNA, 21 bp, Parainfluenza virus
tcaacagcaaccgagagagta

SEQ ID NO: 789 - DNA, 21 bp, Parainfluenza virus
agcaaccgagagagtaaacga

SEQ ID NO: 790 - DNA, 23 bp, Parainfluenza virus
ccagagcaagttcctataatcgt

SEQ ID NO: 791 - DNA, 25 bp, Parainfluenza virus
gacaatacaattacacttgatccgt

SEQ ID NO: 792 - DNA, 24 bp, Parainfluenza virus
tacaattacacttgatccgttagc

SEQ ID NO: 793 - DNA, 21 bp, Adenovirus
caggaactgaaagccattgtc

SEQ ID NO: 794 - DNA, 21 bp, Adenovirus
caaagatcttggttgtgggcc

SEQ ID NO: 795 - DNA, 21 bp, Adenovirus
gcccacgcgctagacatgact

SEQ ID NO: 796 - DNA, 23 bp, Adenovirus
actgaaagccattgtcaaagatc

SEQ ID NO: 797 - DNA, 21 bp, Adenovirus
cgcgctagacatgacttttga

SEQ ID NO: 798 - DNA, 21 bp, Adenovirus
cgtcatcgaaaccgtgtacct

SEQ ID NO: 799 - DNA, 21 bp, Adenovirus
gagcccacccttctttatgtt

SEQ ID NO: 800 - DNA, 21 bp, Adenovirus
ttgaagtctttgacgtggtcc

SEQ ID NO: 801 - DNA, 21 bp, Adenovirus
tacttcaccctgggaaacaag

SEQ ID NO: 802 - DNA, 21 bp, Adenovirus
tgtggctcccacccatgatgt

SEQ ID NO: 803 - DNA, 21 bp, Adenovirus
tggggaacaagtttaggaacc

SEQ ID NO: 804 - DNA, 21 bp, Adenovirus
aacaagtttaggaaccccacc

SEQ ID NO: 805 - DNA, 21 bp, Adenovirus
cacgcgctagacatgaccttt

SEQ ID NO: 806 - DNA, 21 bp, Adenovirus
tccccttgaatcaggctggag

SEQ ID NO: 807 - DNA, 21 bp, Adenovirus
gccgcgactaacgtggtattg

SEQ ID NO: 808 - DNA, 21 bp, Adenovirus
cagtctgccaacactaacgtt

SEQ ID NO: 809 - DNA, 21 bp, Adenovirus
cgagcccacccttctttatgt

SEQ ID NO: 810 - DNA, 24 bp, Adenovirus
ttaattacactgactacaaagccg

SEQ ID NO: 811 - DNA, 21 bp, Adenovirus
gggaaccttacccagccaatt

SEQ ID NO: 812 - DNA, 21 bp, Adenovirus
ccttacccagccaattatcca

SEQ ID NO: 813 - DNA, 21 bp, Adenovirus
atcggaactactgccgttaag

SEQ ID NO: 814 - DNA, 21 bp, Adenovirus
accgacctgggacagaacatg

SEQ ID NO: 815 - DNA, 21 bp, Adenovirus
ctgagggatacaaggatcgca

SEQ ID NO: 816 - DNA, 21 bp, Adenovirus
ccttctccagcaacttcatgt

SEQ ID NO: 817 - DNA, 21 bp, Adenovirus
cctgggacagaacatgctcta

SEQ ID NO: 818 - DNA, 21 bp, Adenovirus
atgcgctggacatgacttttg

SEQ ID NO: 819 - DNA, 21 bp, Enterovirus
ttccttactggctgcttatgg

SEQ ID NO: 820 - DNA, 21 bp, Enterovirus
tactggctgcttatggtgaca

SEQ ID NO: 821 - DNA, 21 bp, Enterovirus
gactactttgggtgtccgtgt

SEQ ID NO: 822 - DNA, 21 bp, Enterovirus
ctttgggtgtccgtgtttcct

SEQ ID NO: 823 - DNA, 21 bp, Enterovirus
tcccccgtgtagatcaggtcg

SEQ ID NO: 824 - DNA, 23 bp, Enterovirus
tacttcgagaaacctagtagcac

SEQ ID NO: 825 - DNA, 21 bp, Enterovirus
tgaaagttgcagagtgtttcg

SEQ ID NO: 826 - DNA, 21 bp, Enterovirus
ctactttgggtgtccgtgttt

SEQ ID NO: 827 - DNA, 21 bp, Enterovirus
taactgcggagcatgtgccct

SEQ ID NO: 828 - DNA, 21 bp, Enterovirus
gggtgtccgtgtttcccttta

SEQ ID NO: 829 - DNA, 25 bp, Enterovirus
tccgtgtttccctttatattcatac

SEQ ID NO: 830 - DNA, 24 bp, Enterovirus
tacttcaagaaacctagtagcacc

SEQ ID NO: 831 - DNA, 24 bp, Enterovirus
tctaatacagacatggtgtgaaga

SEQ ID NO: 832 - DNA, 22 bp, Enterovirus
aacctagtagcaccatgaaagt

SEQ ID NO: 833 - DNA, 21 bp, Enterovirus
gcacttcccccgtgtagatca

SEQ ID NO: 834 - DNA, 22 bp, Enterovirus
caagaaacctagtagcaccatg

SEQ ID NO: 835 - DNA, 22 bp, Enterovirus
gacgctctaatacagacatggt

SEQ ID NO: 836 - DNA, 21 bp, Enterovirus
tgaaagtcgcagagtgtttcg

SEQ ID NO: 837 - DNA, 22 bp, Enterovirus
gatacagtgcaaaccagacatg

SEQ ID NO: 838 - DNA, 22 bp, Enterovirus
gtcaaggtcagagtctagcata

SEQ ID NO: 839 - DNA, 25 bp, Enterovirus
aaatttcactgagactaacaatggg

SEQ ID NO: 840 - DNA, 23 bp, Enterovirus
cataggtcaaggtcagagtctag

SEQ ID NO: 841 - DNA, 23 bp, Enterovirus
tggttactgcaaatttcactgag

SEQ ID NO: 842 - DNA, 22 bp, Enterovirus
ggtcagagtctagcatagagtc

SEQ ID NO: 843 - DNA, 22 bp, Rhinovirus
tgaatgtggctaaccttaaacc

SEQ ID NO: 844 - DNA, 21 bp, Rhinovirus
agctggtcgtaatgagcaatt

SEQ ID NO: 845 - DNA, 24 bp, Rhinovirus
gattgtcaaagatcaagcacttct

SEQ ID NO: 846 - DNA, 24 bp, Rhinovirus
aaaaacaactgagatcgttatccg

SEQ ID NO: 847 - DNA, 21 bp, Rhinovirus
gcctacgcaaagcctagtaat

SEQ ID NO: 848 - DNA, 23 bp, Rhinovirus
atccagattgtcaaagatcaagc

SEQ ID NO: 849 - DNA, 22 bp, Rhinovirus
tagatgaggctagagattcccc

SEQ ID NO: 850 - DNA, 22 bp, Rhinovirus
agggcaaaaacaactgagatcg

SEQ ID NO: 851 - DNA, 21 bp, Rhinovirus
cctggtagatgaggctagaga

SEQ ID NO: 852 - DNA, 24 bp, Rhinovirus
caaaaacaactgagatcgttatcc

SEQ ID NO: 853 - DNA, 21 bp, Rhinovirus
tgcctacgcaaagcctagtaa

SEQ ID NO: 854 - DNA, 22 bp, Rhinovirus
aagggcaaaaacaactgagatc

SEQ ID NO: 855 - DNA, 21 bp, Rhinovirus
acctggtagatgaggctagag

SEQ ID NO: 856 - DNA, 22 bp, Rhinovirus
gtagatgaggctagagattccc

SEQ ID NO: 857 - DNA, 22 bp, Rhinovirus
tagtaaacctggcagatgaggc

SEQ ID NO: 858 - DNA, 21 bp, Rhinovirus
aacctggcagatgaggctaga

SEQ ID NO: 859 - DNA, 21 bp, Rhinovirus
ggcagatgaggctagaagttc

SEQ ID NO: 860 - DNA, 24 bp, Human metapneumovirus
tagaatggacatcccaaaaattgc

SEQ ID NO: 861 - DNA, 21 bp, Human metapneumovirus
tggacatcccaaaaattgcca

SEQ ID NO: 862 - DNA, 22 bp, Human metapneumovirus
atcccaaaaattgccagatcct

SEQ ID NO: 863 - DNA, 23 bp, Respiratory syncytial virus
gtaattaggagggcaaacaatgt

SEQ ID NO: 864 - DNA, 24 bp, Respiratory syncytial virus
tcaggtcttacagcagtaattagg

SEQ ID NO: 865 - DNA, 23 bp, Respiratory syncytial virus
tcttacagcagtaattaggaggg

SEQ ID NO: 866 - DNA, 21 bp, Respiratory syncytial virus
gcagcaggagatagatcaggt

SEQ ID NO: 867 - DNA, 21 bp, Respiratory syncytial virus
cagcagtaattaggagggcaa

SEQ ID NO: 868 - DNA, 25 bp, Respiratory syncytial virus
gatcaggtcttacagcagtaattag

SEQ ID NO: 869 - DNA, 24 bp, Respiratory syncytial virus
ggtcttacagcagtaattaggagg

SEQ ID NO: 870 - DNA, 21 bp, Respiratory syncytial virus
tacagcagtaattaggagggc

SEQ ID NO: 871 - DNA, 21 bp, Respiratory syncytial virus
gttaggacatgctagtgtgca

SEQ ID NO: 872 - DNA, 24 bp, Respiratory syncytial virus
attatgttaggacatgctagtgtg

SEQ ID NO: 873 - DNA, 21 bp, Respiratory syncytial virus
aggccatgtgaattccctgca

SEQ ID NO: 874 - DNA, 22 bp, Respiratory syncytial virus
gtagtaggccatgtgaattccc

SEQ ID NO: 875 - DNA, 21 bp, Respiratory syncytial virus
agtaggccatgtgaattccct

SEQ ID NO: 876 - DNA, 21 bp, Respiratory syncytial virus
gccatgtgaattccctgcatc

SEQ ID NO: 877 - DNA, 23 bp, Respiratory syncytial virus
agtgttaatgcaggtgtaactac

SEQ ID NO: 878 - DNA, 26 bp, Respiratory syncytial virus
gtgtgattatgtatcaaataaggggg

SEQ ID NO: 879 - DNA, 22 bp, Respiratory syncytial virus
gtgttcccctctgatgaatttg

SEQ ID NO: 880 - DNA, 25 bp, Respiratory syncytial virus
catgctatggcaaaactaaatgtac

SEQ ID NO: 881 - DNA, 22 bp, Respiratory syncytial virus
ccgttatcacatctctaggagc

SEQ ID NO: 882 - DNA, 22 bp, Respiratory syncytial virus
atcacatctctaggagccattg

SEQ ID NO: 883 - DNA, 21 bp, Respiratory syncytial virus
taggagccattgtgtcatgct

SEQ ID NO: 884 - DNA, 24 bp, Respiratory syncytial virus
gttttaaccagcaaagtgttagac

SEQ ID NO: 885 - DNA, 24 bp, Respiratory syncytial virus
gagattaccagggaatttagtgtt

SEQ ID NO: 886 - DNA, 24 bp, Respiratory syncytial virus
taccagggaatttagtgttaatgc

SEQ ID NO: 887 - DNA, 21 bp, Respiratory syncytial virus
gtcctgcacctagaaggggaa

SEQ ID NO: 888 - DNA, 24 bp, Respiratory syncytial virus
agacagcaaagttactctatcatg

SEQ ID NO: 889 - DNA, 23 bp, Respiratory syncytial virus
gcaaagttactctatcatgtcca

SEQ ID NO: 890 - DNA, 22 bp, Respiratory syncytial virus
ggggaagtgaacaagatcaaaa

SEQ ID NO: 891 - DNA, 23 bp, Respiratory syncytial virus
tagaaggggaagtgaacaagatc

SEQ ID NO: 892 - DNA, 24 bp, Respiratory syncytial virus
agaggaagtcttagcatatgtagt

SEQ ID NO: 893 - DNA, 24 bp, Respiratory syncytial virus
actactagagattaccagggaatt

SEQ ID NO: 894 - DNA, 26 bp, Respiratory syncytial virus
agaacaacagactactagagattacc

SEQ ID NO: 895 - DNA, 21 bp, Respiratory syncytial virus
agtgttaatgcaggcgtaact

SEQ ID NO: 896 - DNA, 25 bp, Respiratory syncytial virus
acaaaagaacaacagactactagag

SEQ ID NO: 897 - DNA, 21 bp, Herpes simplex virus
gaccaactaccccgatcatca

SEQ ID NO: 898 - DNA, 23 bp, Herpes simplex virus
aagtctgtctttaaaaagcaggg

SEQ ID NO: 899 - DNA, 23 bp, Herpes simplex virus
tgtctttaaaaagcaggggttag

SEQ ID NO: 900 - DNA, 22 bp, Herpes simplex virus
ctttaaaaagcaggggttaggg

SEQ ID NO: 901 - DNA, 21 bp, Herpes simplex virus
aaggactacctggagatcgag

SEQ ID NO: 902 - DNA, 21 bp, Herpes simplex virus
ctacctggagatcgaggtggg

SEQ ID NO: 903 - DNA, 21 bp, Herpes simplex virus
ccgtcatccacaccttatcgt

SEQ ID NO: 904 - DNA, 21 bp, Herpes simplex virus
gtgtattgttgcgatggcgac

SEQ ID NO: 905 - DNA, 21 bp, Herpes simplex virus
ttaagatggccgatcccaatc

SEQ ID NO: 906 - DNA, 22 bp, SARS Coronavirus
tttatggcgggtgggataatat

SEQ ID NO: 907 - DNA, 25 bp, SARS Coronavirus
cgatgttgatgatcctaaattgatg

SEQ ID NO: 908 - DNA, 21 bp, SARS Coronavirus
ggcgggtgggataatatgtta

SEQ ID NO: 909 - DNA, 21 bp, SARS Coronavirus
atggccgatgttgatgatcct

SEQ ID NO: 910 - DNA, 21 bp, SARS Coronavirus
catgtgtggcggctcactata

SEQ ID NO: 911 - DNA, 21 bp, SARS Coronavirus
gtggcggctcactatatgtta

SEQ ID NO: 912 - DNA, 23 bp, SARS Coronavirus
ggctcactatatgttaaaccagg

SEQ ID NO: 913 - DNA, 25 bp, SARS Coronavirus
caagtattaagtgagatggtcatgt

SEQ ID NO: 914 - DNA, 21 bp, SARS Coronavirus
gtgagatggtcatgtgtggcg

SEQ ID NO: 915 - DNA, 23 bp, SARS Coronavirus
attaagtgagatggtcatgtgtg

SEQ ID NO: 916 - DNA, 24 bp, SARS Coronavirus
gatgatatgttacgtcgccttatt

SEQ ID NO: 917 - DNA, 24 bp, SARS Coronavirus
tacgtcgccttattaaagatgttg

SEQ ID NO: 918 - DNA, 23 bp, SARS Coronavirus
accctgaattctcaattgtttgc

SEQ ID NO: 919 - DNA, 21 bp, SARS Coronavirus
actagagatgctgtgggtact

SEQ ID NO: 920 - DNA, 23 bp, SARS Coronavirus
cctaccgtagactcatctctatg

SEQ ID NO: 921 - DNA, 22 bp, SARS Coronavirus
taccaaaggacatgacctaccg

SEQ ID NO: 922 - DNA, 24 bp, SARS Coronavirus
ttaccctcatatgtttatcacccg

SEQ ID NO: 923 - DNA, 21 bp, SARS Coronavirus
agatgctgtgggtactaacct

SEQ ID NO: 924 - DNA, 21 bp, SARS Coronavirus
acaccgtttctacaggttagc

SEQ ID NO: 925 - DNA, 21 bp, Epstein-Barr virus
agcagtacgagtgcctgcgac

SEQ ID NO: 926 - DNA, 21 bp, Epstein-Barr virus
tacgagtgcctgcgaccagat

SEQ ID NO: 927 - DNA, 21 bp, Epstein-Barr virus
cagcgagcagtacgagtgcct

SEQ ID NO: 928 - DNA, 23 bp, Human herpes virus
tcttgcactttacttcccatatc

SEQ ID NO: 929 - DNA, 21 bp, Human herpes virus
gcaactggggcacgctattct

SEQ ID NO: 930 - DNA, 21 bp, Pan bacteria
tctgtaactgacactgaggcg

SEQ ID NO: 931 - DNA, 22 bp, Pan bacteria
ccctttagtgctgaagttaacg

SEQ ID NO: 932 - DNA, 23 bp, Pan bacteria
tgacatcctttgaaaaccctaga

SEQ ID NO: 933 - DNA, 23 bp, Pan bacteria
cattaagttgggcactttaaggt

SEQ ID NO: 934 - DNA, 23 bp, Chlamydia
aaagtctgcgaccatcaattatc

SEQ ID NO: 935 - DNA, 21 bp, Chlamydia
ctataaaggcgttgctttccc

SEQ ID NO: 936 - DNA, 23 bp, Chlamydia
ctttgggagctgaattccaatat

SEQ ID NO: 937 - DNA, 22 bp, Chlamydia
tgaattccaatatgcacagtcc

SEQ ID NO: 938 - DNA, 22 bp, Chlamydia
ggagctgaattccaatatgcac

SEQ ID NO: 939 - DNA, 21 bp, Chlamydia
gggctataaaggcgttgcttt

SEQ ID NO: 940 - DNA, 22 bp, Chlamydia
agctgaattccaatatgcacag

SEQ ID NO: 941 - DNA, 23 bp, Chlamydia
ttgggagctgaattccaatatgc

SEQ ID NO: 942 - DNA, 21 bp, Chlamydia
cgcccgtcacatcatgggagt

SEQ ID NO: 943 - DNA, 25 bp, Chlamydia
tacaatggttagtacagaaggtagc

SEQ ID NO: 944 - DNA, 23 bp, Chlamydia
gaagtcggaattgctagtaatgg

SEQ ID NO: 945 - DNA, 22 bp, Chlamydia
cgtgctacaatggttagtacag

SEQ ID NO: 946 - DNA, 22 bp, Chlamydia
agtacagaaggtagcaagatcg

SEQ ID NO: 947 - DNA, 21 bp, Chlamydia
agaaggtagcaagatcgtgag

SEQ ID NO: 948 - DNA, 21 bp, Chlamydia
atggctgtcgtcagctcgtgc

SEQ ID NO: 949 - DNA, 23 bp, Chlamydia
gggagttggttttaccttaagtc

SEQ ID NO: 950 - DNA, 21 bp, Mycoplasma
aatcccgactcgttaaagcag

SEQ ID NO: 951 - DNA, 22 bp, Mycoplasma
gacaacttgacgaattacacca

SEQ ID NO: 952 - DNA, 24 bp, Mycoplasma
agttcttcaggtacaactaattcc

SEQ ID NO: 953 - DNA, 21 bp, Mycoplasma
caggggacaacttgacgaatt

SEQ ID NO: 954 - DNA, 21 bp, Mycoplasma
agggcagttcttcaggtacaa

SEQ ID NO: 955 - DNA, 21 bp, Mycoplasma
aactacaccaacctccccccc

SEQ ID NO: 956 - DNA, 21 bp, Mycoplasma
ccaccaactacaccaacctcc

SEQ ID NO: 957 - DNA, 21 bp, Mycoplasma
caacaagaggccaccaactac

SEQ ID NO: 958 - DNA, 21 bp, Mycoplasma
agaggccaccaactacaccaa

SEQ ID NO: 959 - DNA, 21 bp, Mycoplasma
gcgtgaacgatgaaggtcttt

SEQ ID NO: 960 - DNA, 22 bp, Mycoplasma
cagcagtagggaatttttcaca

SEQ ID NO: 961 - DNA, 24 bp, Mycoplasma
gaatttttcacaatgagcgaaagc

SEQ ID NO: 962 - DNA, 21 bp, Mycoplasma
ggaggcagcagtagggaattt

SEQ ID NO: 963 - DNA, 23 bp, Streptococcus
ccgccataaaaatatctttgctg

SEQ ID NO: 964 - DNA, 23 bp, Streptococcus
taccaactaagggacagattagg

SEQ ID NO: 965 - DNA, 21 bp, Streptococcus
cccgaagtttgtaccgattgt

SEQ ID NO: 966 - DNA, 21 bp, Streptococcus
aaaaggttatgggagtgcagg

SEQ ID NO: 967 - DNA, 21 bp, Streptococcus
gattattggtcaagcaggggc

SEQ ID NO: 968 - DNA, 22 bp, Streptococcus
aaaagctgaagaattagggctc

SEQ ID NO: 969 - DNA, 24 bp, Bacillus anthracis
cggaattcaaaaatctcaaatggc

SEQ ID NO: 970 - DNA, 21 bp, Bacillus anthracis
acctgtaattagcgttgccgc

SEQ ID NO: 971 - DNA, 23 bp, Bacillus anthracis
ataactccaataccacggaattc

SEQ ID NO: 972 - DNA, 21 bp, Bacillus anthracis
agcgttgccgcaaattttcta

SEQ ID NO: 973 - DNA, 23 bp, Bacillus anthracis
tacggtatagaacctggcattaa

SEQ ID NO: 974 - DNA, 22 bp, Bacillus anthracis
agcttgctgatacggtatagaa

SEQ ID NO: 975 - DNA, 22 bp, Streptococcuspyogenes
tgattcctaaccgtggggcttg

SEQ ID NO: 976 - DNA, 28 bp, Streptococcuspyogenes
ggtcttggaaaagttgacgatattgatc

SEQ ID NO: 977 - DNA, 25 bp, Streptococcuspyogenes
acggatcaacagtgattcctaaccg

SEQ ID NO: 978 - DNA, 21 bp, Streptococcuspyogenes
tcgtgcattgacacctgctga

SEQ ID NO: 979 - DNA, 26 bp, Streptococcuspyogenes
cagatgataaggttcgtgcattgaca

SEQ ID NO: 980 - DNA, 26 bp, Streptococcuspyogenes
ggtaatgccaatccagatgataaggt

SEQ ID NO: 981 - DNA, 29 bp, Streptococcuspyogenes
tgatcctgatcgtgtagtaactattgttg

SEQ ID NO: 982 - DNA, 24 bp, Streptococcuspyogenes
tgtgtcaccaattgatcctgatcg

SEQ ID NO: 983 - DNA, 27 bp, Streptococcuspyogenes
aaaagttcaaggttgtgtcaccaattg

SEQ ID NO: 984 - DNA, 27 bp, Streptococcuspyogenes
ttgtttacacaccaaatgattacgctg

SEQ ID NO: 985 - DNA, 24 bp, Streptococcuspyogenes
acaccttgacggtgatttgaacaa

SEQ ID NO: 986 - DNA, 24 bp, Streptococcuspyogenes
atccatcgaagaacaccttgacgg

SEQ ID NO: 987 - DNA, 23 bp, Streptococcuspyogenes
aagctggaactgagatgactcgt

SEQ ID NO: 988 - DNA, 27 bp, Streptococcuspyogenes
gaaattttggtagaagctggaactgag

SEQ ID NO: 989 - DNA, 25 bp, Streptococcuspyogenes
gctgaaactggcgaaattttggtag

SEQ ID NO: 990 - DNA, 23 bp, Streptococcuspyogenes
accttgtggatgctgaaactggc

SEQ ID NO: 991 - DNA, 25 bp, Streptococcuspyogenes
tcattgctgaaaaccttgtggatgc

SEQ ID NO: 992 - DNA, 21 bp, Streptococcuspyogenes
ttggctgcggttggtcgttac

SEQ ID NO: 993 - DNA, 21 bp, Streptococcuspyogenes
tcgttacgatttggctgcggt

SEQ ID NO: 994 - DNA, 23 bp, Streptococcuspyogenes
attgcgcgtttctttgatgcacg

SEQ ID NO: 995 - DNA, 26 bp, Streptococcuspyogenes
tgcagatagctctcgtagtcttttga

SEQ ID NO: 996 - DNA, 23 bp, Streptococcuspyogenes
cttcgtccaggtgagccaaaaac

SEQ ID NO: 997 - DNA, 22 bp, Streptococcuspyogenes
tttacgagcgtcttcgtccagg

SEQ ID NO: 998 - DNA, 26 bp, Streptococcuspyogenes
gcccttaaagaaatttacgagcgtct

SEQ ID NO: 999 - DNA, 25 bp, Streptococcuspyogenes
cgtacagacgaagcccttaaagaaa

SEQ ID NO: 1000 - DNA, 28 bp, Streptococcuspyogenes
acattcacaaaaatccaagtgattctcg

SEQ ID NO: 1001 - DNA, 27 bp, Streptococcuspyogenes
cgaccttgttcgtaataccattgaaaa

SEQ ID NO: 1002 - DNA, 23 bp, Streptococcuspyogenes
tttggtgaaagcgaccttgttcg

SEQ ID NO: 1003 - DNA, 25 bp, Streptococcuspyogenes
gcgttctccaggtgtttatttcaac

SEQ ID NO: 1004 - DNA, 22 bp, Streptococcuspyogenes
tgcccttggtttctcaggtgat

SEQ ID NO: 1005 - DNA, 21 bp, Streptococcuspyogenes
ccttggttcgtgcccttggtt

SEQ ID NO: 1006 - DNA, 25 bp, Streptococcuspyogenes
tacccgtaagattccattcacaacc

SEQ ID NO: 1007 - DNA, 24 bp, Streptococcuspyogenes
tcgtattgaccgtacccgtaagat

SEQ ID NO: 1008 - DNA, 24 bp, Streptococcuspyogenes
cattgcctacactcgtattgaccg

SEQ ID NO: 1009 - DNA, 26 bp, Streptococcuspyogenes
ctgactcaaaagacattgcctacact

SEQ ID NO: 1010 - DNA, 22 bp, Streptococcuspyogenes
tctcagttggtgcgttctccag

SEQ ID NO: 1011 - DNA, 29 bp, Streptococcuspyogenes
gttggaattagagactgactcaaaagaca

SEQ ID NO: 1012 - DNA, 22 bp, Streptococcuspyogenes
cgtggggcttggttggaattag

SEQ ID NO: 1013 - DNA, 25 bp, Streptococcuspyogenes
cgtatcatcgtttctcagttggtgc

SEQ ID NO: 1014 - DNA, 24 bp, Mycoplasmapneumoniae
cgcagcttagtgagtgactatgtc

SEQ ID NO: 1015 - DNA, 25 bp, Mycoplasmapneumoniae
tgaaccgtggtcaacaaattaacga

SEQ ID NO: 1016 - DNA, 21 bp, Mycoplasmapneumoniae
gctgatggagtgaaccgtggt

SEQ ID NO: 1017 - DNA, 23 bp, Mycoplasmapneumoniae
agctcacaattgctgatggagtg

SEQ ID NO: 1018 - DNA, 28 bp, Mycoplasmapneumoniae
cttcttaaaggaaaagctcacaattgct

SEQ ID NO: 1019 - DNA, 24 bp, Mycoplasmapneumoniae
gaccaaaagatccgcagcttagtg

SEQ ID NO: 1020 - DNA, 21 bp, Mycoplasmapneumoniae
tggaatcacccgcatggagcg

SEQ ID NO: 1021 - DNA, 23 bp, Mycoplasmapneumoniae
cgtttggaaagtggaatcacccg

SEQ ID NO: 1022 - DNA, 22 bp, Mycoplasmapneumoniae
cttcggccatcggtaagtacga

SEQ ID NO: 1023 - DNA, 24 bp, Mycoplasmapneumoniae
gggattgcctctgaccaaaagatc

SEQ ID NO: 1024 - DNA, 21 bp, Mycoplasmapneumoniae
atgtatccgtgccagtggtgg

SEQ ID NO: 1025 - DNA, 23 bp, Mycoplasmapneumoniae
cgacaacttcgatgtatccgtgc

SEQ ID NO: 1026 - DNA, 27 bp, Mycoplasmapneumoniae
tttatgtgaacaacgacaacttcgatg

SEQ ID NO: 1027 - DNA, 25 bp, Mycoplasmapneumoniae
taacctttcccctgaatcgttgttg

SEQ ID NO: 1028 - DNA, 24 bp, Mycoplasmapneumoniae
tggtagtgctgttaacctttcccc

SEQ ID NO: 1029 - DNA, 29 bp, Mycoplasmapneumoniae
gtccaaaagattaagttaaccactgatgg

SEQ ID NO: 1030 - DNA, 23 bp, Mycoplasmapneumoniae
aaaactgatctccgccgtaaggg

SEQ ID NO: 1031 - DNA, 24 bp, Mycoplasmapneumoniae
gctgcccaaaacaaccaaattgac

SEQ ID NO: 1032 - DNA, 25 bp, Mycoplasmapneumoniae
aagattaagcaagctgcccaaaaca

SEQ ID NO: 1033 - DNA, 28 bp, Mycoplasmapneumoniae
aagaagaaatcgacaagattaagcaagc

SEQ ID NO: 1034 - DNA, 26 bp, Mycoplasmapneumoniae
ttgtgaccttcatttaaaaaacgggg

SEQ ID NO: 1035 - DNA, 25 bp, Mycoplasmapneumoniae
agcggatttaccaaaaaacacttgc

SEQ ID NO: 1036 - DNA, 22 bp, Mycoplasmapneumoniae
tccgcgatggcaaaactgatct

SEQ ID NO: 1037 - DNA, 27 bp, Mycoplasmapneumoniae
ttaagaattaccgagcggatttaccaa

SEQ ID NO: 1038 - DNA, 29 bp, Mycoplasmapneumoniae
aggtatcacgtaagttaagaattaccgag

SEQ ID NO: 1039 - DNA, 26 bp, Mycoplasmapneumoniae
gctggtcgttataaggtatcacgtaa

SEQ ID NO: 1040 - DNA, 21 bp, Mycoplasmapneumoniae
cctctccgctgctggtcgtta

SEQ ID NO: 1041 - DNA, 23 bp, Mycoplasmapneumoniae
agaaggtataacctctccgctgc

SEQ ID NO: 1042 - DNA, 24 bp, Mycoplasmapneumoniae
tactgtgttcacgtttcttccgtc

SEQ ID NO: 1043 - DNA, 25 bp, Mycoplasmapneumoniae
gttaccacgctttactgtgttcacg

SEQ ID NO: 1044 - DNA, 27 bp, Mycoplasmapneumoniae
tggtttagaaaacaccgatgaatgtcc

SEQ ID NO: 1045 - DNA, 28 bp, Mycoplasmapneumoniae
tccatttcactacgtggtttagaaaaca

SEQ ID NO: 1046 - DNA, 27 bp, Mycoplasmapneumoniae
gctgctaaacacattgttcatgaattg

SEQ ID NO: 1047 - DNA, 21 bp, Mycoplasmapneumoniae
caccgaacgggctgctaaaca

SEQ ID NO: 1048 - DNA, 24 bp, Mycoplasmapneumoniae
ggataaaatcatcaccgaacgggc

SEQ ID NO: 1049 - DNA, 25 bp, Mycoplasmapneumoniae
ttagaagcggacatggatgagttga

SEQ ID NO: 1050 - DNA, 25 bp, Mycoplasmapneumoniae
aaagtaggtcagttagaagcggaca

SEQ ID NO: 1051 - DNA, 25 bp, Mycoplasmapneumoniae
cagtgaagctaaaccaaatgaccct

SEQ ID NO: 1052 - DNA, 26 bp, Chlamydiaydophilapneumoniae
gttcaggacttgctagaatggagaaa

SEQ ID NO: 1053 - DNA, 26 bp, Chlamydiaydophilapneumoniae
caaaatcaatgtcgttcaggacttgc

SEQ ID NO: 1054 - DNA, 28 bp, Chlamydiaydophilapneumoniae
tcggagaactcattcaaaatcaatgtcg

SEQ ID NO: 1055 - DNA, 21 bp, Chlamydiaydophilapneumoniae
gtccgctctgtcggagaactc

SEQ ID NO: 1056 - DNA, 22 bp, Chlamydiaydophilapneumoniae
ctaatcgacgtgtccgctctgt

SEQ ID NO: 1057 - DNA, 26 bp, Chlamydiaydophilapneumoniae
attgatcatcttgctaatcgacgtgt

SEQ ID NO: 1058 - DNA, 28 bp, Chlamydiaydophilapneumoniae
cttgtgtagacgatattgatcatcttgc

SEQ ID NO: 1059 - DNA, 26 bp, Chlamydiaydophilapneumoniae
ggagatgaaaaagcttgtgtagacga

SEQ ID NO: 1060 - DNA, 28 bp, Chlamydiaydophilapneumoniae
ttcgtttgaaaatgggagatgaaaaagc

SEQ ID NO: 1061 - DNA, 31 bp, Chlamydiaydophilapneumoniae
ccttaaagtatctgattcgtttgaaaatggg

SEQ ID NO: 1062 - DNA, 27 bp, Chlamydiaydophilapneumoniae
gatgtgatcggagccttaaagtatctg

SEQ ID NO: 1063 - DNA, 27 bp, Chlamydiaydophilapneumoniae
tttgagaaaagaagatgtgatcggagc

SEQ ID NO: 1064 - DNA, 30 bp, Chlamydiaydophilapneumoniae
tatagatgatgaagctctgtctcaagttac

SEQ ID NO: 1065 - DNA, 25 bp, Chlamydiaydophilapneumoniae
tgtagggcgttataagctcaatcgc

SEQ ID NO: 1066 - DNA, 25 bp, Chlamydiaydophilapneumoniae
taatctaggacgtgtagggcgttat

SEQ ID NO: 1067 - DNA, 23 bp, Chlamydiaydophilapneumoniae
gctcttctttgaccccaaacgtt

SEQ ID NO: 1068 - DNA, 28 bp, Chlamydiaydophilapneumoniae
tctactatcatgaggctcttctttgacc

SEQ ID NO: 1069 - DNA, 27 bp, Chlamydiaydophilapneumoniae
agctaatgcacgttctactatcatgag

SEQ ID NO: 1070 - DNA, 22 bp, Chlamydiaydophilapneumoniae
gtccaggagaacctgcaactct

SEQ ID NO: 1071 - DNA, 28 bp, Chlamydiaydophilapneumoniae
ctgttaagattgctgtagatgctgatga

SEQ ID NO: 1072 - DNA, 26 bp, Chlamydiaydophilapneumoniae
gctggaatcgcttctgttaagattgc

SEQ ID NO: 1073 - DNA, 25 bp, Chlamydiaydophilapneumoniae
caatgttaaaacggatgctcgatgc

SEQ ID NO: 1074 - DNA, 27 bp, Chlamydiaydophilapneumoniae
gaaaagccggagaaaagttaagtacag

SEQ ID NO: 1075 - DNA, 28 bp, Chlamydiaydophilapneumoniae
ttgatgaagcctcctctctagtttatgg

SEQ ID NO: 1076 - DNA, 27 bp, Chlamydiaydophilapneumoniae
gcagacaatattattgatgaagcctcc

SEQ ID NO: 1077 - DNA, 27 bp, Chlamydiaydophilapneumoniae
ctttgctcttcttgttggaaggatttt

SEQ ID NO: 1078 - DNA, 27 bp, Chlamydiaydophilapneumoniae
gaagtgagaaagactttgctcttcttg

SEQ ID NO: 1079 - DNA, 27 bp, Chlamydiaydophilapneumoniae
tcgttctccaggaattaactttgaaca

SEQ ID NO: 1080 - DNA, 27 bp, Chlamydiaydophilapneumoniae
actcttcagatgcagatatcatcgaag

SEQ ID NO: 1081 - DNA, 23 bp, Chlamydiaydophilapneumoniae
tcccaagttcatcgttctccagg

SEQ ID NO: 1082 - DNA, 22 bp, Chlamydiaydophilapneumoniae
atcgtggaagttggctcgaagc

SEQ ID NO: 1083 - DNA, 25 bp, Chlamydiaydophilapneumoniae
agagtcgttgtttcccaagttcatc

SEQ ID NO: 1084 - DNA, 27 bp, B.thuringensis
aagtaggggatacagatgatatcgacc

SEQ ID NO: 1085 - DNA, 28 bp, B.thuringensis
ttttactgctactgtaattccaaaccgc

SEQ ID NO: 1086 - DNA, 27 bp, B.thuringensis
ggcgaacgtgtaattaatgtaattggt

SEQ ID NO: 1087 - DNA, 22 bp, B.thuringensis
ctgagtcagaaggcgaacgtgt

SEQ ID NO: 1088 - DNA, 22 bp, B.thuringensis
aggcgatgttgagctgcaatct

SEQ ID NO: 1089 - DNA, 23 bp, B.thuringensis
ggagtggtagaaggcgatgttga

SEQ ID NO: 1090 - DNA, 23 bp, B.thuringensis
aaccaatgggtggagtggtagaa

SEQ ID NO: 1091 - DNA, 23 bp, B.thuringensis
caaaacagcgaaaccaatgggtg

SEQ ID NO: 1092 - DNA, 29 bp, B.thuringensis
cacttgatcgcattttaccttacttagag

SEQ ID NO: 1093 - DNA, 24 bp, B.thuringensis
tagatcgtcgtacacttgatcgca

SEQ ID NO: 1094 - DNA, 26 bp, B.thuringensis
aagtggataaaaacggaaaacgtggt

SEQ ID NO: 1095 - DNA, 27 bp, B.thuringensis
gaaggaacaatcttagatcgtcgtaca

SEQ ID NO: 1096 - DNA, 26 bp, B.thuringensis
aattttagcggcagaaggaacaatct

SEQ ID NO: 1097 - DNA, 25 bp, B.thuringensis
agaaactggtgaaattttagcggca

SEQ ID NO: 1098 - DNA, 26 bp, B.thuringensis
gctacgatttagcaaatgtaggtcgc

SEQ ID NO: 1099 - DNA, 24 bp, B.thuringensis
tgtctcgtttcttcgatccaaagc

SEQ ID NO: 1100 - DNA, 26 bp, B.thuringensis
aagagcttacttgtgtctcgtttctt

SEQ ID NO: 1101 - DNA, 29 bp, B.thuringensis
cagtagaaaatgctaagagcttacttgtg

SEQ ID NO: 1102 - DNA, 26 bp, B.thuringensis
ggtgaaccaccaacagtagaaaatgc

SEQ ID NO: 1103 - DNA, 25 bp, B.thuringensis
aaatttatgagcgtctacgtcctgg

SEQ ID NO: 1104 - DNA, 28 bp, B.thuringensis
gaaaaagacaacacagatagcacagaaa

SEQ ID NO: 1105 - DNA, 26 bp, B.thuringensis
cgctctccaagcgtatactatagtgg

SEQ ID NO: 1106 - DNA, 27 bp, B.thuringensis
accgagcttttaggtgataacgaatac

SEQ ID NO: 1107 - DNA, 27 bp, B.thuringensis
tgatcaagaaatcaccgagcttttagg

SEQ ID NO: 1108 - DNA, 25 bp, B.thuringensis
agggtttggctctgatcaagaaatc

SEQ ID NO: 1109 - DNA, 22 bp, B.thuringensis
ttacgcgcattagggtttggct

SEQ ID NO: 1110 - DNA, 26 bp, B.thuringensis
cgcgtaaacttcctgtaactgttttg

SEQ ID NO: 1111 - DNA, 23 bp, B.thuringensis
cccagttagttcgctctccaagc

SEQ ID NO: 1112 - DNA, 28 bp, B.thuringensis
cagatgctaaggatgttgtatatgtgcg

SEQ ID NO: 1113 - DNA, 29 bp, B.thuringensis
gttagagtatgagacagatgctaaggatg

SEQ ID NO: 1114 - DNA, 23 bp, B.thuringensis
cgcggagcttggttagagtatga

SEQ ID NO: 1115 - DNA, 26 bp, B.thuringensis
cgtgttatcgtttcccagttagttcg

SEQ ID NO: 1116 - DNA, 21 bp, B.subtilis
aaccgtggcgcatggttagaa

SEQ ID NO: 1117 - DNA, 25 bp, B.subtilis
gagtaggcgacacagatgatatcga

SEQ ID NO: 1118 - DNA, 25 bp, B.subtilis
ttttaccgcaactgtcattccaaac

SEQ ID NO: 1119 - DNA, 21 bp, B.subtilis
cttcttcaacctgctgcacgg

SEQ ID NO: 1120 - DNA, 27 bp, B.subtilis
cttcaatcagctacttcttcaacctgc

SEQ ID NO: 1121 - DNA, 28 bp, B.subtilis
atcgaagaagagattaaaaacatcacgc

SEQ ID NO: 1122 - DNA, 25 bp, B.subtilis
ggcaatgcttacatcgaagaagaga

SEQ ID NO: 1123 - DNA, 30 bp, B.subtilis
aagaaggagaacaggttatcaatgtaatcg

SEQ ID NO: 1124 - DNA, 25 bp, B.subtilis
ctccgactgatcaagaaggagaaca

SEQ ID NO: 1125 - DNA, 21 bp, B.subtilis
gaatggcggcgttgttgaaga

SEQ ID NO: 1126 - DNA, 21 bp, B.subtilis
agctgtatccgaatggcggcg

SEQ ID NO: 1127 - DNA, 26 bp, B.subtilis
agaagaacgcttgataaagtactgcc

SEQ ID NO: 1128 - DNA, 25 bp, B.subtilis
ctgaaacgcttgttgatcctgaaac

SEQ ID NO: 1129 - DNA, 24 bp, B.subtilis
atcagagacttgctgaaacgcttg

SEQ ID NO: 1130 - DNA, 25 bp, B.subtilis
atcgcctcttcaatcagagacttgc

SEQ ID NO: 1131 - DNA, 25 bp, B.subtilis
aacgatacgatcttgccaatgtagg

SEQ ID NO: 1132 - DNA, 27 bp, B.subtilis
ttctttgatccgaaacgatacgatctt

SEQ ID NO: 1133 - DNA, 26 bp, B.subtilis
gcttgattctcgtttctttgatccga

SEQ ID NO: 1134 - DNA, 23 bp, B.subtilis
gcgaaaagcttgcttgattctcg

SEQ ID NO: 1135 - DNA, 26 bp, B.subtilis
tacagtagaaaatgcgaaaagcttgc

SEQ ID NO: 1136 - DNA, 23 bp, B.subtilis
ggagagccgcctacagtagaaaa

SEQ ID NO: 1137 - DNA, 22 bp, B.subtilis
atttacgagcgtctccgtcctg

SEQ ID NO: 1138 - DNA, 23 bp, B.subtilis
cgttgctggaaatttacgagcgt

SEQ ID NO: 1139 - DNA, 21 bp, B.subtilis
agcgacaaagcgttgctggaa

SEQ ID NO: 1140 - DNA, 24 bp, B.subtilis
aacacagaaaacagcgacaaagcg

SEQ ID NO: 1141 - DNA, 29 bp, B.subtilis
cgcttgataaagataacacagaaaacagc

SEQ ID NO: 1142 - DNA, 25 bp, B.subtilis
acctgcgaaatacgcttgataaaga

SEQ ID NO: 1143 - DNA, 27 bp, B.subtilis
ggagaaaacgaatacctgcgaaatacg

SEQ ID NO: 1144 - DNA, 31 bp, B.subtilis
attcttgatctcataggagaaaacgaatacc

SEQ ID NO: 1145 - DNA, 27 bp, B.subtilis
gttcggtctccaagtgtatatttcagt

SEQ ID NO: 1146 - DNA, 23 bp, B.subtilis
ttacggttcttttgcgtgctctc

SEQ ID NO: 1147 - DNA, 24 bp, B.subtilis
gtaagttgccggttacggttcttt

SEQ ID NO: 1148 - DNA, 22 bp, B.subtilis
tgatcgcacacgtaagttgccg

SEQ ID NO: 1149 - DNA, 23 bp, B.subtilis
tatgtccgcattgatcgcacacg

SEQ ID NO: 1150 - DNA, 27 bp, B.subtilis
gaaagatgttgtttatgtccgcattga

SEQ ID NO: 1151 - DNA, 25 bp, B.subtilis
cgaaactgatgcgaaagatgttgtt

SEQ ID NO: 1152 - DNA, 21 bp, B.subtilis
ttcccagcttgttcggtctcc

SEQ ID NO: 1153 - DNA, 27 bp, B.subtilis
catggttagaatacgaaactgatgcga

SEQ ID NO: 1154 - DNA, 23 bp, B.subtilis
cgtgttatcgtttcccagcttgt

SEQ ID NO: 1155 - DNA, 28 bp, B.cereus
aaagtaggggatacagatgatatcgacc

SEQ ID NO: 1156 - DNA, 21 bp, B.cereus
aggcgagcgcgtaattaacgt

SEQ ID NO: 1157 - DNA, 27 bp, B.cereus
ctaagagcttacttgtgtctcgtttct

SEQ ID NO: 1158 - DNA, 26 bp, B.anthracis
taggggatacagatgatatcgaccac

SEQ ID NO: 1159 - DNA, 30 bp, B.anthracis
acttactatacaaagtaggggatacagatg

SEQ ID NO: 1160 - DNA, 28 bp, B.anthracis
gcaaacattactcgtgatgtaaaacaca

SEQ ID NO: 1161 - DNA, 27 bp, B.anthracis
cgagcgcgtaattaatgtaattggtaa

SEQ ID NO: 1162 - DNA, 27 bp, B.anthracis
ggtgatgttgagctgcaatctattaag

SEQ ID NO: 1163 - DNA, 25 bp, B.anthracis
ggagtggtagaaggtgatgttgagc

SEQ ID NO: 1164 - DNA, 25 bp, B.anthracis
ttagatcgtcgtacacttgatcgca

SEQ ID NO: 1165 - DNA, 27 bp, B.anthracis
agaaggaacaatcttagatcgtcgtac

SEQ ID NO: 1166 - DNA, 26 bp, B.anthracis
aaattttagcggcagaaggaacaatc

SEQ ID NO: 1167 - DNA, 25 bp, B.anthracis
cagaaactggtgaaattttagcggc

SEQ ID NO: 1168 - DNA, 29 bp, B.anthracis
caacgtttagctgaaacattagtagatcc

SEQ ID NO: 1169 - DNA, 27 bp, B.anthracis
cagattgtttaaccaacgtttagctga

SEQ ID NO: 1170 - DNA, 26 bp, B.anthracis
gctatgatttagcaaatgtaggtcgc

SEQ ID NO: 1171 - DNA, 25 bp, B.anthracis
gtgtctcgtttcttcgatccaaagc

SEQ ID NO: 1172 - DNA, 26 bp, B.anthracis
caagagcttacttgtgtctcgtttct

SEQ ID NO: 1173 - DNA, 27 bp, B.anthracis
cagtagaaaatgccaagagcttacttg

SEQ ID NO: 1174 - DNA, 18 bp, Influenza A
ggaactgagggagcaatt

SEQ ID NO: 1175 - DNA, 20 bp, Influenza A
atgttacccaggatatttcg

SEQ ID NO: 1176 - DNA, 19 bp, Influenza A
ggatatttcgccgactatg

SEQ ID NO: 1177 - DNA, 17 bp, Influenza A
gaggaactgagggagca

SEQ ID NO: 1178 - DNA, 20 bp, Influenza A
actatgaggaacttagggag

SEQ ID NO: 1179 - DNA, 20 bp, Influenza A
aactgagggagcaattaagt

SEQ ID NO: 1180 - DNA, 18 bp, Influenza A
ctatggctgacggagaag

SEQ ID NO: 1181 - DNA, 19 bp, Influenza A
ggaactgagagagcaattg

SEQ ID NO: 1182 - DNA, 20 bp, Influenza A
agaactgagggaacaattga

SEQ ID NO: 1183 - DNA, 18 bp, Influenza A
ggagatttcgccgactat

SEQ ID NO: 1184 - DNA, 17 bp, Influenza A
gagctgagggagcaatt

SEQ ID NO: 1185 - DNA, 18 bp, Influenza A
ccagggtatttctccgac

SEQ ID NO: 1186 - DNA, 18 bp, Influenza A
gaggaactgaaggagcaa

SEQ ID NO: 1187 - DNA, 19 bp, Influenza A
aaagaatggcttgtaccca

SEQ ID NO: 1188 - DNA, 20 bp, Influenza A
ctgagggaacaattgagttc

SEQ ID NO: 1189 - DNA, 22 bp, Influenza A
gtatcatcattcgagagattcg

SEQ ID NO: 1190 - DNA, 18 bp, Influenza A
ctgacggagaagaatggt

SEQ ID NO: 1191 - DNA, 22 bp, Influenza A
agtatcatcattcgagagattc

SEQ ID NO: 1192 - DNA, 20 bp, Influenza A
gagcatgtcctatgtaaaca

SEQ ID NO: 1193 - DNA, 21 bp, Influenza A
ctcagtatcatcattcgagag

SEQ ID NO: 1194 - DNA, 22 bp, Influenza A
agtatcatcattcgagagattt

SEQ ID NO: 1195 - DNA, 18 bp, Influenza A
catagaggaccaaagggc

SEQ ID NO: 1196 - DNA, 23 bp, Influenza A
atcattcgagagatttgaaatat

SEQ ID NO: 1197 - DNA, 22 bp, Influenza A
gtatcatcattcgagagatttg

SEQ ID NO: 1198 - DNA, 18 bp, Influenza A
cccaaatctgagcatgtc

SEQ ID NO: 1199 - DNA, 20 bp, Influenza A
aatgcgaatcactgttttct

SEQ ID NO: 1200 - DNA, 19 bp, Influenza A
attgcagaaacaccaaact

SEQ ID NO: 1201 - DNA, 19 bp, Influenza A
cagaatgcgaatcactgtt

SEQ ID NO: 1202 - DNA, 19 bp, Influenza A
agaatgcgaatcactgttt

SEQ ID NO: 1203 - DNA, 22 bp, Influenza A
gaatcactgttttctaaggaat

SEQ ID NO: 1204 - DNA, 22 bp, Influenza A
cttagtatcatcattcgagaga

SEQ ID NO: 1205 - DNA, 24 bp, Influenza A
aaaatgaaagcaaaactaatagtc

SEQ ID NO: 1206 - DNA, 19 bp, Influenza A
atgcgaatcactgttttct

SEQ ID NO: 1207 - DNA, 22 bp, Influenza A
aatcactgttttctaaggaatc

SEQ ID NO: 1208 - DNA, 19 bp, Influenza A
atccagaatgcgaatcact

SEQ ID NO: 1209 - DNA, 18 bp, Influenza A
cagaatgcgaatcactgg

SEQ ID NO: 1210 - DNA, 19 bp, Influenza A
cttgaggacaatcacaacg

SEQ ID NO: 1211 - DNA, 18 bp, Influenza A
accgtaaccaaaggagtg

SEQ ID NO: 1212 - DNA, 22 bp, Influenza A
gacacagtactagaaaagaatg

SEQ ID NO: 1213 - DNA, 19 bp, Influenza A
gtaaccaaaggagtgacgg

SEQ ID NO: 1214 - DNA, 21 bp, Influenza A
ggagaatgaactattactgga

SEQ ID NO: 1215 - DNA, 22 bp, Influenza A
acacagtactagaaaagaatgt

SEQ ID NO: 1216 - DNA, 20 bp, Influenza A
atttacagctacatctgcag

SEQ ID NO: 1217 - DNA, 22 bp, Influenza A
aatcactgatttctaaggaatc

SEQ ID NO: 1218 - DNA, 18 bp, Influenza A
cccaaaatgcgaatcact

SEQ ID NO: 1219 - DNA, 20 bp, Influenza A
catttccagctacatatgca

SEQ ID NO: 1220 - DNA, 18 bp, Influenza A
gctgacggaaaagaatgg

SEQ ID NO: 1221 - DNA, 23 bp, Influenza A
cagtttcttcatttgaaagattt

SEQ ID NO: 1222 - DNA, 21 bp, Influenza A
aggatgaactattactggaca

SEQ ID NO: 1223 - DNA, 18 bp, Influenza A
aggaagaagtccttgtgc

SEQ ID NO: 1224 - DNA, 20 bp, Influenza A
cagtgtcttcatttgaaagg

SEQ ID NO: 1225 - DNA, 19 bp, Influenza A
gtcctgttatgtgcactct

SEQ ID NO: 1226 - DNA, 17 bp, Influenza A
gacagtcacaacgggaa

SEQ ID NO: 1227 - DNA, 23 bp, Influenza A
gaaatattccctaaggaaagttc

SEQ ID NO: 1228 - DNA, 22 bp, Influenza A
agtcctatgtgaacaataaagg

SEQ ID NO: 1229 - DNA, 20 bp, Influenza A
aaagtaagagatcaagcagg

SEQ ID NO: 1230 - DNA, 19 bp, Influenza A
actgtaaccaaaggagtga

SEQ ID NO: 1231 - DNA, 19 bp, Influenza A
ccccaaggaaagttcatgg

SEQ ID NO: 1232 - DNA, 18 bp, Influenza A
cgactaaaaggaacagcc

SEQ ID NO: 1233 - DNA, 19 bp, Influenza A
attccccaaggaaagttca

SEQ ID NO: 1234 - DNA, 19 bp, Influenza A
acagtaaccaaaggagtga

SEQ ID NO: 1235 - DNA, 17 bp, Influenza A
cattgccggtttcattg

SEQ ID NO: 1236 - DNA, 17 bp, Influenza A
aggtttgtttggagcca

SEQ ID NO: 1237 - DNA, 23 bp, Influenza A
catttgaaaggtttgaaattttc

SEQ ID NO: 1238 - DNA, 23 bp, Influenza A
atttgaaaggtttgaaattttcc

SEQ ID NO: 1239 - DNA, 22 bp, Influenza A
gaacaataaagggaaagaagtc

SEQ ID NO: 1240 - DNA, 20 bp, Influenza A
atcaagcagggagaattaac

SEQ ID NO: 1241 - DNA, 19 bp, Influenza A
cacaacgtaaccaaaggag

SEQ ID NO: 1242 - DNA, 19 bp, Influenza A
acacaacgtaaccaaagga

SEQ ID NO: 1243 - DNA, 24 bp, Influenza A
acataatagagacttcaaattcaa

SEQ ID NO: 1244 - DNA, 18 bp, Influenza A
ccaaggaaagttcatggc

SEQ ID NO: 1245 - DNA, 24 bp, Influenza A
attattattggacactgttagatc

SEQ ID NO: 1246 - DNA, 20 bp, Influenza A
cccaggagatttcatcaatt

SEQ ID NO: 1247 - DNA, 19 bp, Influenza A
aaccacacagtaaccaaag

SEQ ID NO: 1248 - DNA, 23 bp, Influenza A
atagagacttcaaattcagaaaa

SEQ ID NO: 1249 - DNA, 16 bp, Influenza A
attgccggtttcattg

SEQ ID NO: 1250 - DNA, 24 bp, Influenza A
catcatttgaaagatttgagatat

SEQ ID NO: 1251 - DNA, 24 bp, Influenza A
catttgaaagatttgagatattcc

SEQ ID NO: 1252 - DNA, 21 bp, Influenza A
gaaatattccccaaggatagc

SEQ ID NO: 1253 - DNA, 21 bp, Influenza A
cagtactcgaaaagaatgtga

SEQ ID NO: 1254 - DNA, 23 bp, Influenza A
catttgaaaggtttgaaattttt

SEQ ID NO: 1255 - DNA, 21 bp, Influenza A
cactgttctctaaggaatcat

SEQ ID NO: 1256 - DNA, 22 bp, Influenza A
aaaactatgcagactaaaagga

SEQ ID NO: 1257 - DNA, 21 bp, Influenza A
cggaaaactatgtagactagg

SEQ ID NO: 1258 - DNA, 19 bp, Influenza A
aaccacaacgtaaccaaag

SEQ ID NO: 1259 - DNA, 17 bp, Influenza A
aacattgccggatggat

SEQ ID NO: 1260 - DNA, 21 bp, Influenza A
gcagggagaatgaactattat

SEQ ID NO: 1261 - DNA, 20 bp, Influenza A
gtacttgagaaaaacgtgac

SEQ ID NO: 1262 - DNA, 18 bp, Influenza A
agaggagtaacggcatca

SEQ ID NO: 1263 - DNA, 19 bp, Influenza A
agtaactgcatcatgctcc

SEQ ID NO: 1264 - DNA, 22 bp, Influenza A
ggatgaattattattggacact

SEQ ID NO: 1265 - DNA, 19 bp, Influenza A
gaaacaccaaaccctgaaa

SEQ ID NO: 1266 - DNA, 20 bp, Influenza A
acaattcaactgacactgta

SEQ ID NO: 1267 - DNA, 21 bp, Influenza A
atattccccaaggaaagatca

SEQ ID NO: 1268 - DNA, 22 bp, Influenza A
aaaactatgcagactaaaaggg

SEQ ID NO: 1269 - DNA, 18 bp, Influenza A
caacgggaaactatgtcg

SEQ ID NO: 1270 - DNA, 21 bp, Influenza A
cagtgtcatcatttgaaagat

SEQ ID NO: 1271 - DNA, 22 bp, Influenza A
aggcagaatgaattattattgg

SEQ ID NO: 1272 - DNA, 20 bp, Influenza A
ccactacaattggggaaatg

SEQ ID NO: 1273 - DNA, 18 bp, Influenza A
agaaacaccaaactccga

SEQ ID NO: 1274 - DNA, 22 bp, Influenza A
acttcaaattcagaaaatggaa

SEQ ID NO: 1275 - DNA, 18 bp, Influenza A
aggaaagatcatggccca

SEQ ID NO: 1276 - DNA, 22 bp, Influenza A
gtcatcatttgaaagatttgag

SEQ ID NO: 1277 - DNA, 19 bp, Influenza A
agctcagtgtcatcatttg

SEQ ID NO: 1278 - DNA, 20 bp, Influenza A
atcatgagacaaccaaaggt

SEQ ID NO: 1279 - DNA, 19 bp, Influenza A
catggccaaatcatgagac

SEQ ID NO: 1280 - DNA, 18 bp, Influenza A
ccaaggaaagatcatggc

SEQ ID NO: 1281 - DNA, 19 bp, Influenza A
accaaaccctgaaaatgga

SEQ ID NO: 1282 - DNA, 21 bp, Influenza A
actacaattggggaaatgtaa

SEQ ID NO: 1283 - DNA, 19 bp, Influenza A
atggccaaatcatgagaca

SEQ ID NO: 1284 - DNA, 17 bp, Influenza A
agttcatggcccaaaca

SEQ ID NO: 1285 - DNA, 19 bp, Influenza A
ggccaaatcatgagacaac

SEQ ID NO: 1286 - DNA, 20 bp, Influenza A
gtagaaacaccaaactctga

SEQ ID NO: 1287 - DNA, 19 bp, Influenza A
cgtaaccagaggagtaacg

SEQ ID NO: 1288 - DNA, 22 bp, Influenza A
gagacttcaaattcagaaaacg

SEQ ID NO: 1289 - DNA, 18 bp, Influenza A
gacaccaaaccctgagaa

SEQ ID NO: 1290 - DNA, 21 bp, Influenza A
ggtttgaaattttcccaaaag

SEQ ID NO: 1291 - DNA, 19 bp, Influenza A
gagtaactgcatcatgctc

SEQ ID NO: 1292 - DNA, 18 bp, Influenza A
accaaactccgagaatgg

SEQ ID NO: 1293 - DNA, 18 bp, Influenza A
cacaccgtaagcaaagga

SEQ ID NO: 1294 - DNA, 19 bp, Influenza A
actacaattggggaaatgc

SEQ ID NO: 1295 - DNA, 19 bp, Influenza A
gctcagtgtcatcatttga

SEQ ID NO: 1296 - DNA, 20 bp, Influenza A
ccataaccaaaggagtaacg

SEQ ID NO: 1297 - DNA, 21 bp, Influenza A
agcaattgagcttagtatcat

SEQ ID NO: 1298 - DNA, 18 bp, Influenza A
caccaaactccgagaatg

SEQ ID NO: 1299 - DNA, 18 bp, Influenza A
aaacaccaaactccgaga

SEQ ID NO: 1300 - DNA, 21 bp, Influenza A
aaaggtttgaaattttcccaa

SEQ ID NO: 1301 - DNA, 23 bp, Influenza A
gatacagtactagaaaagaatgt

SEQ ID NO: 1302 - DNA, 24 bp, Influenza A
ctacagaaatttaatatggctagt

SEQ ID NO: 1303 - DNA, 18 bp, Influenza A
aacaccaaactccgagaa

SEQ ID NO: 1304 - DNA, 24 bp, Influenza A
catttgaaagattcgagatatttc

SEQ ID NO: 1305 - DNA, 19 bp, Influenza A
ccaaatcatgagacaacca

SEQ ID NO: 1306 - DNA, 21 bp, Influenza A
ataggagtaactgcatcatgc

SEQ ID NO: 1307 - DNA, 24 bp, Influenza A
ataatgggaaactatgtaaactaa

SEQ ID NO: 1308 - DNA, 22 bp, Influenza A
caggagatttcatcaattatga

SEQ ID NO: 1309 - DNA, 17 bp, Influenza A
accgtaaccaaaggggt

SEQ ID NO: 1310 - DNA, 21 bp, Influenza A
ctacaattggggaaatgtaac

SEQ ID NO: 1311 - DNA, 22 bp, Influenza A
cagaaatttaatatggctggtc

SEQ ID NO: 1312 - DNA, 17 bp, Influenza A
aaaggagtaacggcagc

SEQ ID NO: 1313 - DNA, 19 bp, Influenza A
acgtaaccagaggagtaac

SEQ ID NO: 1314 - DNA, 21 bp, Influenza A
gaaagaagtgcttgtaatctg

SEQ ID NO: 1315 - DNA, 21 bp, Influenza A
gagacacaataacattcgaag

SEQ ID NO: 1316 - DNA, 23 bp, Influenza A
agatttcatcaattatgaggagc

SEQ ID NO: 1317 - DNA, 23 bp, Influenza A
agtttcttcatttgaaaagtttg

SEQ ID NO: 1318 - DNA, 21 bp, Influenza A
acagtttttatcggaacttgc

SEQ ID NO: 1319 - DNA, 18 bp, Influenza A
cctcatggccaaatcatg

SEQ ID NO: 1320 - DNA, 19 bp, Influenza A
agactgaaaggaatagccc

SEQ ID NO: 1321 - DNA, 21 bp, Influenza A
agacacaataacattcgaagc

SEQ ID NO: 1322 - DNA, 19 bp, Influenza A
acacactctgttaacctgc

SEQ ID NO: 1323 - DNA, 23 bp, Influenza A
cataatgggaaactatgtaaact

SEQ ID NO: 1324 - DNA, 25 bp, Influenza A
aaaagcttctacagaaatttaatat

SEQ ID NO: 1325 - DNA, 23 bp, Influenza A
atcaattatgaagagctaagaga

SEQ ID NO: 1326 - DNA, 18 bp, Influenza A
acctcatggccaaatcat

SEQ ID NO: 1327 - DNA, 17 bp, Influenza A
ccgctacagatgcagac

SEQ ID NO: 1328 - DNA, 20 bp, Influenza A
aattcatacccaaagctcag

SEQ ID NO: 1329 - DNA, 18 bp, Influenza A
gagacaccaaaccctgag

SEQ ID NO: 1330 - DNA, 19 bp, Influenza A
atgagacaaccaaaggtgt

SEQ ID NO: 1331 - DNA, 22 bp, Influenza A
ctatggatagtaaagaagggaa

SEQ ID NO: 1332 - DNA, 20 bp, Influenza A
ctagacctaaagtcagagga

SEQ ID NO: 1333 - DNA, 18 bp, Influenza A
ctgaaggagcaattgagc

SEQ ID NO: 1334 - DNA, 20 bp, Influenza A
agctagacctaaagtcagag

SEQ ID NO: 1335 - DNA, 21 bp, Influenza A
aaaattcatacccaaagctca

SEQ ID NO: 1336 - DNA, 21 bp, Influenza A
agcttcaaattcagaaaatgg

SEQ ID NO: 1337 - DNA, 18 bp, Influenza A
aacctcatggccaaatca

SEQ ID NO: 1338 - DNA, 22 bp, Influenza A
ggagatttcatcaattatgagg

SEQ ID NO: 1339 - DNA, 23 bp, Influenza A
agaaaagaatgtaacagtaacac

SEQ ID NO: 1340 - DNA, 18 bp, Influenza A
catggccaaatcatgagg

SEQ ID NO: 1341 - DNA, 21 bp, Influenza A
ctcagtttttatcggaacttg

SEQ ID NO: 1342 - DNA, 19 bp, Influenza A
atctcatggccaaatcatg

SEQ ID NO: 1343 - DNA, 21 bp, Influenza A
aacagtttttatcggaacttg

SEQ ID NO: 1344 - DNA, 22 bp, Influenza A
aaagaatgtaacagtaacacac

SEQ ID NO: 1345 - DNA, 20 bp, Influenza A
agtttttatcggaacttgct

SEQ ID NO: 1346 - DNA, 21 bp, Influenza A
aacaaagtctctaccagaatg

SEQ ID NO: 1347 - DNA, 24 bp, Influenza A
aatcctatattaacaataagggga

SEQ ID NO: 1348 - DNA, 18 bp, Influenza A
atggaacatgctaccccg

SEQ ID NO: 1349 - DNA, 20 bp, Influenza A
cagaaaatggaacatgctac

SEQ ID NO: 1350 - DNA, 21 bp, Influenza A
aatgtaacagtaacacactct

SEQ ID NO: 1351 - DNA, 19 bp, Influenza A
cgaagcaactggaaatcta

SEQ ID NO: 1352 - DNA, 22 bp, Influenza A
aaaagaatgtaacagtaacaca

SEQ ID NO: 1353 - DNA, 20 bp, Influenza A
gctagacctaaagtcagaga

SEQ ID NO: 1354 - DNA, 21 bp, Influenza A
gctatggatagtaaagaaggg

SEQ ID NO: 1355 - DNA, 22 bp, Influenza A
ctatggatagtaaagaagggag

SEQ ID NO: 1356 - DNA, 20 bp, Influenza A
cactgttagatcaaggagac

SEQ ID NO: 1357 - DNA, 21 bp, Influenza A
gaaattttcccaaaagcaaac

SEQ ID NO: 1358 - DNA, 19 bp, Influenza A
ccaacaaagtctctaccag

SEQ ID NO: 1359 - DNA, 21 bp, Influenza A
gattcagaaaatggaacatgc

SEQ ID NO: 1360 - DNA, 20 bp, Influenza A
attcagaaaatggaacatgc

SEQ ID NO: 1361 - DNA, 22 bp, Influenza A
catttgaaaggttcgaaatttt

SEQ ID NO: 1362 - DNA, 20 bp, Influenza A
gacactgttagatcaaggag

SEQ ID NO: 1363 - DNA, 21 bp, Influenza A
cttttatcggaacttgctatg

SEQ ID NO: 1364 - DNA, 18 bp, Influenza A
cacactctgttaacctgc

SEQ ID NO: 1365 - DNA, 18 bp, Influenza A
ctagtcctgttgtgtgca

SEQ ID NO: 1366 - DNA, 18 bp, Influenza A
aagctcatggccaaatca

SEQ ID NO: 1367 - DNA, 20 bp, Influenza A
aactcagagaatggaacatg

SEQ ID NO: 1368 - DNA, 20 bp, Influenza A
agttcagtgtcatcatttga

SEQ ID NO: 1369 - DNA, 24 bp, Influenza A
aaaaagcttctacagaaatttaat

SEQ ID NO: 1370 - DNA, 19 bp, Influenza A
gcagctagacctaaagtca

SEQ ID NO: 1371 - DNA, 22 bp, Influenza A
gctatggatagtaaagaaggaa

SEQ ID NO: 1372 - DNA, 21 bp, Influenza A
aatcatgaaacaaccaaaggt

SEQ ID NO: 1373 - DNA, 19 bp, Influenza A
gctcagtatcatcactcga

SEQ ID NO: 1374 - DNA, 18 bp, Influenza A
gtccatcacccacctaac

SEQ ID NO: 1375 - DNA, 19 bp, Influenza A
cgcagtttttatcggaact

SEQ ID NO: 1376 - DNA, 21 bp, Influenza A
caaataactcaactgacactg

SEQ ID NO: 1377 - DNA, 18 bp, Influenza A
aaccaaaggtgtaacggc

SEQ ID NO: 1378 - DNA, 21 bp, Influenza A
gcagtttttatcggaatttgc

SEQ ID NO: 1379 - DNA, 20 bp, Influenza A
cacaacgggaaactatgtaa

SEQ ID NO: 1380 - DNA, 20 bp, Influenza A
acaattggggaaatgtaaca

SEQ ID NO: 1381 - DNA, 21 bp, Influenza A
gcagcttctacagaaatttac

SEQ ID NO: 1382 - DNA, 20 bp, Influenza A
cagtgtcatcattcgaaaga

SEQ ID NO: 1383 - DNA, 18 bp, Influenza A
acactctgttaacctgct

SEQ ID NO: 1384 - DNA, 22 bp, Influenza A
aaaatgtaacagtaacacactc

SEQ ID NO: 1385 - DNA, 24 bp, Influenza A
ctagaaaagaatgtaacagtaaca

SEQ ID NO: 1386 - DNA, 17 bp, Influenza A
ggctcatacccaaagct

SEQ ID NO: 1387 - DNA, 19 bp, Influenza A
atcggaacttgctatggat

SEQ ID NO: 1388 - DNA, 23 bp, Influenza A
gtcctacataatagaaacttcaa

SEQ ID NO: 1389 - DNA, 19 bp, Influenza A
acagtactcgaaaagaacg

SEQ ID NO: 1390 - DNA, 22 bp, Influenza A
cacagtttttatcggaatttgc

SEQ ID NO: 1391 - DNA, 21 bp, Influenza A
acagtttttatcggaatttgc

SEQ ID NO: 1392 - DNA, 20 bp, Influenza A
aaaaaccaaaccctgagaat

SEQ ID NO: 1393 - DNA, 20 bp, Influenza A
cgtaactaaaggagtaacgg

SEQ ID NO: 1394 - DNA, 20 bp, Influenza A
acaaagtctctaccagaatg

SEQ ID NO: 1395 - DNA, 21 bp, Influenza A
atactgttgacacaatactcg

SEQ ID NO: 1396 - DNA, 17 bp, Influenza A
agctcatggccaaatca

SEQ ID NO: 1397 - DNA, 19 bp, Influenza A
aatgcagatgcctatgttt

SEQ ID NO: 1398 - DNA, 21 bp, Influenza A
agcagtttttatcggaatttg

SEQ ID NO: 1399 - DNA, 19 bp, Influenza A
cactctgttaacctgcttg

SEQ ID NO: 1400 - DNA, 22 bp, Influenza A
catttgagaggtttgaaatttt

SEQ ID NO: 1401 - DNA, 16 bp, Influenza A
aggaagctcatggcca

SEQ ID NO: 1402 - DNA, 19 bp, Influenza A
ccagaatgcagatgcatat

SEQ ID NO: 1403 - DNA, 20 bp, Influenza A
cgcagtttttatcggaattt

SEQ ID NO: 1404 - DNA, 19 bp, Influenza A
acaattggggaaatgcaac

SEQ ID NO: 1405 - DNA, 22 bp, Influenza A
cataacgggaaactatgtaaac

SEQ ID NO: 1406 - DNA, 18 bp, Influenza A
caaacctactggtcctgt

SEQ ID NO: 1407 - DNA, 20 bp, Influenza A
cagcaagtcatacacaaaca

SEQ ID NO: 1408 - DNA, 22 bp, Influenza A
ataacgggaaactatgtaaact

SEQ ID NO: 1409 - DNA, 22 bp, Influenza A
ctattactggacactagtagag

SEQ ID NO: 1410 - DNA, 18 bp, Influenza A
caagttcatggcccaacc

SEQ ID NO: 1411 - DNA, 18 bp, Influenza A
caagcagggaggatgaac

SEQ ID NO: 1412 - DNA, 18 bp, Influenza A
acattcgaagcaactgga

SEQ ID NO: 1413 - DNA, 19 bp, Influenza A
ctcatacccaaagcttagc

SEQ ID NO: 1414 - DNA, 16 bp, Influenza A
acatgctaccccggag

SEQ ID NO: 1415 - DNA, 18 bp, Influenza A
ccgcagtttttatcggaa

SEQ ID NO: 1416 - DNA, 20 bp, Influenza A
gattcaagccagaaatagca

SEQ ID NO: 1417 - DNA, 19 bp, Influenza A
aaggaaaagaagtgcttgt

SEQ ID NO: 1418 - DNA, 23 bp, Influenza A
gaaactatgtaaactaaaagggg

SEQ ID NO: 1419 - DNA, 18 bp, Influenza A
cccaaggcaagttcatgg

SEQ ID NO: 1420 - DNA, 19 bp, Influenza A
ctcgaaaagaacgtgacag

SEQ ID NO: 1421 - DNA, 21 bp, Influenza A
aattcatacccaaagcttagc

SEQ ID NO: 1422 - DNA, 21 bp, Influenza A
atttgaaattttcccaagagc

SEQ ID NO: 1423 - DNA, 20 bp, Influenza A
atatgtttttgtggggtcat

SEQ ID NO: 1424 - DNA, 22 bp, Influenza A
cagtctcatcatttgaaagatt

SEQ ID NO: 1425 - DNA, 16 bp, Influenza A
aacatgctaccccgga

SEQ ID NO: 1426 - DNA, 18 bp, Influenza A
gcagctgagttcagtttc

SEQ ID NO: 1427 - DNA, 22 bp, Influenza A
gatagtaaagaagggaaactcc

SEQ ID NO: 1428 - DNA, 20 bp, Influenza A
agtgtcttcatttgaaaggt

SEQ ID NO: 1429 - DNA, 23 bp, Influenza A
acttcaaattcaaaaaatggaaa

SEQ ID NO: 1430 - DNA, 18 bp, Influenza A
aaaagcaacctcatggcc

SEQ ID NO: 1431 - DNA, 19 bp, Influenza A
atgtttttgtggggtcatc

SEQ ID NO: 1432 - DNA, 22 bp, Influenza A
caaataattcaactgacactgt

SEQ ID NO: 1433 - DNA, 21 bp, Influenza A
cacactctgttaaccttttag

SEQ ID NO: 1434 - DNA, 20 bp, Influenza A
agtgtcatcattcgaaagat

SEQ ID NO: 1435 - DNA, 20 bp, Influenza A
ccctcagtttttatcggaac

SEQ ID NO: 1436 - DNA, 26 bp, Influenza A
caatactattagtcttgctatataca

SEQ ID NO: 1437 - DNA, 21 bp, Influenza A
aagctcagcaaatcctatatt

SEQ ID NO: 1438 - DNA, 26 bp, Influenza A
atactattagtcttgctatatacatt

SEQ ID NO: 1439 - DNA, 17 bp, Influenza A
gacaagttcatggccca

SEQ ID NO: 1440 - DNA, 19 bp, Influenza A
atgcctatgtttttgtggg

SEQ ID NO: 1441 - DNA, 16 bp, Influenza A
gcaagttcatggccca

SEQ ID NO: 1442 - DNA, 23 bp, Influenza A
agacacactatgtataggttatc

SEQ ID NO: 1443 - DNA, 18 bp, Influenza A
cccaaaagcaacctcatg

SEQ ID NO: 1444 - DNA, 21 bp, Influenza A
acaaaataacattcgaagcaa

SEQ ID NO: 1445 - DNA, 18 bp, Influenza A
atattccccaaggcaagt

SEQ ID NO: 1446 - DNA, 21 bp, Influenza A
cttcaaattcagaaaacggaa

SEQ ID NO: 1447 - DNA, 20 bp, Influenza A
aactaagctcagtgtcatca

SEQ ID NO: 1448 - DNA, 18 bp, Influenza A
ggaattaagggagcagct

SEQ ID NO: 1449 - DNA, 18 bp, Influenza A
attaagggagcagctgag

SEQ ID NO: 1450 - DNA, 20 bp, Influenza A
acttcaaattcagaaaacgg

SEQ ID NO: 1451 - DNA, 19 bp, Influenza A
gctaagagagcagttgagc

SEQ ID NO: 1452 - DNA, 23 bp, Influenza A
cacactatgtataggttatcatg

SEQ ID NO: 1453 - DNA, 21 bp, Influenza A
gagaattcgctgattatgagg

SEQ ID NO: 1454 - DNA, 18 bp, Influenza A
ctacaattggggaagtgc

SEQ ID NO: 1455 - DNA, 21 bp, Influenza A
aattcatacccaaaactcagc

SEQ ID NO: 1456 - DNA, 20 bp, Influenza A
aagatttgagatattccccg

SEQ ID NO: 1457 - DNA, 22 bp, Influenza A
cgggaaactatgtaaactaaga

SEQ ID NO: 1458 - DNA, 19 bp, Influenza A
aagaattaagggagcagct

SEQ ID NO: 1459 - DNA, 19 bp, Influenza A
cccaatcatgaaacgaaca

SEQ ID NO: 1460 - DNA, 23 bp, Influenza A
agttaatttactagaaaacagcc

SEQ ID NO: 1461 - DNA, 24 bp, Influenza A
gactcattcagttaatttactaga

SEQ ID NO: 1462 - DNA, 21 bp, Influenza A
gcaaataattcaactgacact

SEQ ID NO: 1463 - DNA, 19 bp, Influenza A
gccagatcatgagacaacc

SEQ ID NO: 1464 - DNA, 19 bp, Influenza A
gacaatgggacatgttacc

SEQ ID NO: 1465 - DNA, 23 bp, Influenza A
acccattcagttaatttactaga

SEQ ID NO: 1466 - DNA, 23 bp, Influenza A
cgggaaactatgtaaattaaaag

SEQ ID NO: 1467 - DNA, 20 bp, Influenza A
gagatattccccaagacaag

SEQ ID NO: 1468 - DNA, 19 bp, Influenza A
catcaaatcccgagaatgg

SEQ ID NO: 1469 - DNA, 20 bp, Influenza A
ggagaattcgctgattatga

SEQ ID NO: 1470 - DNA, 20 bp, Influenza A
gcctctatcagaatgcttat

SEQ ID NO: 1471 - DNA, 23 bp, Influenza A
ctatattaacaataaggggaagg

SEQ ID NO: 1472 - DNA, 18 bp, Influenza A
ctggagcaaacagcttct

SEQ ID NO: 1473 - DNA, 26 bp, Influenza A
ctattagtcttgctatatacatttac

SEQ ID NO: 1474 - DNA, 24 bp, Influenza A
acagtattagaaaagaatgtaaca

SEQ ID NO: 1475 - DNA, 20 bp, Influenza A
gtacacaaacaacaaaggga

SEQ ID NO: 1476 - DNA, 20 bp, Influenza A
attttcccaaaagcaaactc

SEQ ID NO: 1477 - DNA, 21 bp, Influenza A
gaaactcctatcctaagctca

SEQ ID NO: 1478 - DNA, 19 bp, Influenza A
cactttcagctacagatgc

SEQ ID NO: 1479 - DNA, 19 bp, Influenza A
caagatatgccttcgcaat

SEQ ID NO: 1480 - DNA, 20 bp, Influenza A
cagagaatggaacatgctac

SEQ ID NO: 1481 - DNA, 21 bp, Influenza A
gctcagtgttatcatttgaaa

SEQ ID NO: 1482 - DNA, 19 bp, Influenza A
catctgtgtaggctaccat

SEQ ID NO: 1483 - DNA, 20 bp, Influenza A
attcatacccaaaactcagc

SEQ ID NO: 1484 - DNA, 19 bp, Influenza A
ctatgccgactaaaaggga

SEQ ID NO: 1485 - DNA, 22 bp, Influenza A
ccaaaatgaaggcaatactatt

SEQ ID NO: 1486 - DNA, 19 bp, Influenza A
caaaagcaaactcatggcc

SEQ ID NO: 1487 - DNA, 16 bp, Influenza A
aacatgctaccccggg

SEQ ID NO: 1488 - DNA, 21 bp, Influenza A
gaaatgcagacacattatgta

SEQ ID NO: 1489 - DNA, 20 bp, Influenza A
agaattcgctgattatgagg

SEQ ID NO: 1490 - DNA, 20 bp, Influenza A
gaattcgctgattatgagga

SEQ ID NO: 1491 - DNA, 21 bp, Influenza A
cttgctatggatagtgaagaa

SEQ ID NO: 1492 - DNA, 20 bp, Influenza A
agcaactggaaatctaatgg

SEQ ID NO: 1493 - DNA, 17 bp, Influenza A
acggaacatgctacccc

SEQ ID NO: 1494 - DNA, 19 bp, Influenza A
aacccactctgttaacctt

SEQ ID NO: 1495 - DNA, 20 bp, Influenza A
caaattcagaaaacggaaca

SEQ ID NO: 1496 - DNA, 21 bp, Influenza A
aaattcagaaaatggaacgtg

SEQ ID NO: 1497 - DNA, 18 bp, Influenza A
accaagatatgccttcgc

SEQ ID NO: 1498 - DNA, 17 bp, Influenza A
acgtgttacccaggaga

SEQ ID NO: 1499 - DNA, 17 bp, Influenza A
ggacaagcaggcagaat

SEQ ID NO: 1500 - DNA, 19 bp, Influenza A
acaccaaatcccaagaatg

SEQ ID NO: 1501 - DNA, 21 bp, Influenza A
actctgttaaccttcttgaag

SEQ ID NO: 1502 - DNA, 16 bp, Influenza A
catgctaccccggaga

SEQ ID NO: 1503 - DNA, 19 bp, Influenza A
cggagaattcgctgattat

SEQ ID NO: 1504 - DNA, 21 bp, Influenza A
caattatgaggagctaagaga

SEQ ID NO: 1505 - DNA, 20 bp, Influenza A
aatcatgagaccaccaaagg

SEQ ID NO: 1506 - DNA, 20 bp, Influenza A
gggaaactcctatcctaagc

SEQ ID NO: 1507 - DNA, 20 bp, Influenza A
catgaaacaaccaaaggtgt

SEQ ID NO: 1508 - DNA, 24 bp, Influenza A
gtagtcttgctatatacatttaca

SEQ ID NO: 1509 - DNA, 20 bp, Influenza A
aaactcctatcctaagctca

SEQ ID NO: 1510 - DNA, 19 bp, Influenza A
attccccaaggatagctca

SEQ ID NO: 1511 - DNA, 25 bp, Influenza A
aactatgtaaattaaaaggaatagc

SEQ ID NO: 1512 - DNA, 22 bp, Influenza A
acccattcagttaatttactcg

SEQ ID NO: 1513 - DNA, 22 bp, Influenza A
atcactgttttctaggaaatca

SEQ ID NO: 1514 - DNA, 24 bp, Influenza A
actatgtaaactaaaagggatagc

SEQ ID NO: 1515 - DNA, 18 bp, Influenza A
gtccttatgctggagcaa

SEQ ID NO: 1516 - DNA, 19 bp, Influenza A
agaaaacggaacatgctac

SEQ ID NO: 1517 - DNA, 21 bp, Influenza A
cttcaaactcagaaaatggaa

SEQ ID NO: 1518 - DNA, 18 bp, Influenza A
agcccgcagtttttatcg

SEQ ID NO: 1519 - DNA, 17 bp, Influenza A
aaaaggaacagccccac

SEQ ID NO: 1520 - DNA, 21 bp, Influenza A
caacgggaaactatgtaaatt

SEQ ID NO: 1521 - DNA, 20 bp, Influenza A
gcagatgcatatgtttttgt

SEQ ID NO: 1522 - DNA, 23 bp, Influenza A
gtgactcattcagttaatttact

SEQ ID NO: 1523 - DNA, 21 bp, Influenza A
acttcagattcagaaaatgga

SEQ ID NO: 1524 - DNA, 22 bp, Influenza A
ctctgttaaccttctagaaaac

SEQ ID NO: 1525 - DNA, 21 bp, Influenza A
ggaaactcctatcctaaactc

SEQ ID NO: 1526 - DNA, 17 bp, Influenza A
ggatagctcatggccca

SEQ ID NO: 1527 - DNA, 17 bp, Influenza A
ctctcactctggagccc

SEQ ID NO: 1528 - DNA, 19 bp, Influenza A
acgattcgagatattcccc

SEQ ID NO: 1529 - DNA, 22 bp, Influenza A
gacactatatgtatagggtacc

SEQ ID NO: 1530 - DNA, 17 bp, Influenza A
ggcaaattcatggccca

SEQ ID NO: 1531 - DNA, 16 bp, Influenza A
gcatgctctcactccg

SEQ ID NO: 1532 - DNA, 20 bp, Influenza A
ggaaacatcgaaatcagaca

SEQ ID NO: 1533 - DNA, 20 bp, Influenza A
aaactatgtaaactgggggg

SEQ ID NO: 1534 - DNA, 22 bp, Influenza A
ctatattgtagaaacacggacc

SEQ ID NO: 1535 - DNA, 20 bp, Influenza A
ctatccagggtatttctccg

SEQ ID NO: 1536 - DNA, 19 bp, Influenza A
cagactgaaagggatagcc

SEQ ID NO: 1537 - DNA, 20 bp, Influenza A
cagtatcatgctcccatagg

SEQ ID NO: 1538 - DNA, 19 bp, Influenza A
acagcaagagattcaagcc

SEQ ID NO: 1539 - DNA, 21 bp, Influenza A
ggaaacaccaaattctgaaaa

SEQ ID NO: 1540 - DNA, 18 bp, Influenza A
ggggactcatacccaaag

SEQ ID NO: 1541 - DNA, 16 bp, Influenza A
aaggtgccacagctgc

SEQ ID NO: 1542 - DNA, 22 bp, Influenza A
agaaaaatgtaactgtgactca

SEQ ID NO: 1543 - DNA, 17 bp, Influenza A
aaaggtgtcacagcagc

SEQ ID NO: 1544 - DNA, 17 bp, Influenza A
ctgtgtgggctaccatg

SEQ ID NO: 1545 - DNA, 17 bp, Influenza A
aggcaaattcatggccc

SEQ ID NO: 1546 - DNA, 15 bp, Influenza A
gcaagttcgtggccc

SEQ ID NO: 1547 - DNA, 20 bp, Influenza A
ggaaactcctaccctaaact

SEQ ID NO: 1548 - DNA, 17 bp, Influenza A
catctgtgtgggctacc

SEQ ID NO: 1549 - DNA, 16 bp, Influenza A
aaaggtgtcacagccg

SEQ ID NO: 1550 - DNA, 21 bp, Influenza A
ataaacaaaggagtaactgca

SEQ ID NO: 1551 - DNA, 18 bp, Influenza A
gagaaggagggctcatac

SEQ ID NO: 1552 - DNA, 18 bp, Influenza A
agcaagagattcaagcca

SEQ ID NO: 1553 - DNA, 19 bp, Influenza A
acaacacaaccaaaggagt

SEQ ID NO: 1554 - DNA, 15 bp, Influenza A
aggtgccacagctgc

SEQ ID NO: 1555 - DNA, 20 bp, Influenza A
ctactcactgcaaactcatg

SEQ ID NO: 1556 - DNA, 21 bp, Influenza A
ccattgcacttaggtaaatgt

SEQ ID NO: 1557 - DNA, 20 bp, Influenza A
caaacacagcgtaaacaaag

SEQ ID NO: 1558 - DNA, 18 bp, Influenza A
caaccacaacacaaacgg

SEQ ID NO: 1559 - DNA, 21 bp, Influenza A
atgtagactgagaggaatagc

SEQ ID NO: 1560 - DNA, 19 bp, Influenza A
gtgaatttgctcgaagaca

SEQ ID NO: 1561 - DNA, 18 bp, Influenza A
ggtaccacagttgcatgc

SEQ ID NO: 1562 - DNA, 17 bp, Influenza A
ctctggagccaacagtt

SEQ ID NO: 1563 - DNA, 17 bp, Influenza A
actctggagccaacagt

SEQ ID NO: 1564 - DNA, 19 bp, Influenza A
atatacacttacagccgca

SEQ ID NO: 1565 - DNA, 19 bp, Influenza A
gagtgcagatgcatatgtt

SEQ ID NO: 1566 - DNA, 17 bp, Influenza A
agggaagtgcaacgtag

SEQ ID NO: 1567 - DNA, 18 bp, Influenza A
ggaactgtaacattgccg

SEQ ID NO: 1568 - DNA, 19 bp, Influenza A
ctatgtaagctaaggggga

SEQ ID NO: 1569 - DNA, 15 bp, Influenza A
acaagctcgtggccc

SEQ ID NO: 1570 - DNA, 20 bp, Influenza A
cttacaactgggaaattgca

SEQ ID NO: 1571 - DNA, 17 bp, Influenza A
ccctacaactggggaac

SEQ ID NO: 1572 - DNA, 20 bp, Influenza A
agaatgtgacttactgctca

SEQ ID NO: 1573 - DNA, 18 bp, Influenza A
actgcaatgtagcaggat

SEQ ID NO: 1574 - DNA, 25 bp, Influenza A
gtcctatataatggaaaaagaaaac

SEQ ID NO: 1575 - DNA, 25 bp, Influenza A
gtcctatataatggaaaaagaaaat

SEQ ID NO: 1576 - DNA, 25 bp, Influenza A
catatataatggagaaagaaaatcc

SEQ ID NO: 1577 - DNA, 23 bp, Influenza A
atttcgagaaagtaaagattctg

SEQ ID NO: 1578 - DNA, 23 bp, Influenza A
catttcgagaaagtaaagattct

SEQ ID NO: 1579 - DNA, 24 bp, Influenza A
atataatggagaaagaaaatccaa

SEQ ID NO: 1580 - DNA, 21 bp, Influenza A
gaattgaaacatctcctcagc

SEQ ID NO: 1581 - DNA, 20 bp, Influenza A
aaggacattcttgagaagac

SEQ ID NO: 1582 - DNA, 21 bp, Influenza A
cgagaaagtaaagattctgcc

SEQ ID NO: 1583 - DNA, 20 bp, Influenza A
atacaacaactggaggttca

SEQ ID NO: 1584 - DNA, 22 bp, Influenza A
aacatttcgagaaagtaaagat

SEQ ID NO: 1585 - DNA, 20 bp, Influenza A
aggacattcttgagaagacc

SEQ ID NO: 1586 - DNA, 22 bp, Influenza A
cacatttcgagaaagtaaagat

SEQ ID NO: 1587 - DNA, 21 bp, Influenza A
gaattgaaacatctcctcacc

SEQ ID NO: 1588 - DNA, 20 bp, Influenza A
aggacattcttgagaagact

SEQ ID NO: 1589 - DNA, 18 bp, Influenza A
gccaaggacattcttgag

SEQ ID NO: 1590 - DNA, 23 bp, Influenza A
ataatggagaaagaaaatccaag

SEQ ID NO: 1591 - DNA, 19 bp, Influenza A
cagcatacaacaactggag

SEQ ID NO: 1592 - DNA, 21 bp, Influenza A
agaatgtgataggcttctaag

SEQ ID NO: 1593 - DNA, 21 bp, Influenza A
gataccatgccaataattcca

SEQ ID NO: 1594 - DNA, 19 bp, Influenza A
cacagcatacaacaactgg

SEQ ID NO: 1595 - DNA, 20 bp, Influenza A
gaccagatatgcattggata

SEQ ID NO: 1596 - DNA, 21 bp, Influenza A
ataatggagaaagaaaacccg

SEQ ID NO: 1597 - DNA, 20 bp, Influenza A
accagatatgcattggatac

SEQ ID NO: 1598 - DNA, 20 bp, Influenza A
agaaagtaaagattctgccc

SEQ ID NO: 1599 - DNA, 19 bp, Influenza A
atccagaatgtgataggct

SEQ ID NO: 1600 - DNA, 21 bp, Influenza A
gaatgtgataggcttctaagt

SEQ ID NO: 1601 - DNA, 19 bp, Influenza A
ggaccagatatgcattgga

SEQ ID NO: 1602 - DNA, 19 bp, Influenza A
atgccaaggacattcttga

SEQ ID NO: 1603 - DNA, 18 bp, Influenza A
actcatgccaaggacatt

SEQ ID NO: 1604 - DNA, 18 bp, Influenza A
gcatacaacaactggagg

SEQ ID NO: 1605 - DNA, 20 bp, Influenza A
aaggtcgacacaattctaga

SEQ ID NO: 1606 - DNA, 20 bp, Influenza A
aaagtaaagattctgcccag

SEQ ID NO: 1607 - DNA, 19 bp, Influenza A
gaaacatctcctcagcagc

SEQ ID NO: 1608 - DNA, 20 bp, Influenza A
aagtaaagattctgcccaaa

SEQ ID NO: 1609 - DNA, 19 bp, Influenza A
acacagcatacaacaactg

SEQ ID NO: 1610 - DNA, 22 bp, Influenza A
cacttcgagaaagtaaagattc

SEQ ID NO: 1611 - DNA, 19 bp, Influenza A
gacacagcatacaacaact

SEQ ID NO: 1612 - DNA, 19 bp, Influenza A
attgaaacatctcctcagc

SEQ ID NO: 1613 - DNA, 20 bp, Influenza A
agtaaagattctgcccaaag

SEQ ID NO: 1614 - DNA, 19 bp, Influenza A
aatccctccacttgaacta

SEQ ID NO: 1615 - DNA, 19 bp, Influenza A
ccatgccaataattccaca

SEQ ID NO: 1616 - DNA, 21 bp, Influenza A
gaatgtgataggcttctaacc

SEQ ID NO: 1617 - DNA, 21 bp, Influenza A
aattgaaacatctcctcacta

SEQ ID NO: 1618 - DNA, 22 bp, Influenza A
ccatcatttatctcattctcct

SEQ ID NO: 1619 - DNA, 20 bp, Influenza A
gtaaagattctgcccaaaga

SEQ ID NO: 1620 - DNA, 21 bp, Influenza A
gtaattccacagaaaaggtcg

SEQ ID NO: 1621 - DNA, 19 bp, Influenza A
accatgccaataattccac

SEQ ID NO: 1622 - DNA, 21 bp, Influenza A
aatgtgataggcttctaaggg

SEQ ID NO: 1623 - DNA, 19 bp, Influenza A
gacacaattctagagcgga

SEQ ID NO: 1624 - DNA, 22 bp, Influenza A
cagaatgtgatagacttctaac

SEQ ID NO: 1625 - DNA, 18 bp, Influenza A
caggcagcttcaatgatt

SEQ ID NO: 1626 - DNA, 18 bp, Influenza A
ggggaccagatatgcatt

SEQ ID NO: 1627 - DNA, 20 bp, Influenza A
atgcaaactaaacggaatcc

SEQ ID NO: 1628 - DNA, 20 bp, Influenza A
aaccatcattcttcaggaac

SEQ ID NO: 1629 - DNA, 22 bp, Influenza A
catcatttatctcattctcctg

SEQ ID NO: 1630 - DNA, 19 bp, Influenza A
cggtcgacacaattctaga

SEQ ID NO: 1631 - DNA, 18 bp, Influenza A
cgacacaattctagagcg

SEQ ID NO: 1632 - DNA, 20 bp, Influenza A
agacatacaacaactggagg

SEQ ID NO: 1633 - DNA, 23 bp, Influenza A
aacatttcgagaaagtaaaaatt

SEQ ID NO: 1634 - DNA, 21 bp, Influenza A
ataattccacagagaaggtcg

SEQ ID NO: 1635 - DNA, 18 bp, Influenza A
gcacagcatacaacaact

SEQ ID NO: 1636 - DNA, 21 bp, Influenza A
attgaaacatctcctcagtag

SEQ ID NO: 1637 - DNA, 21 bp, Influenza A
gtgaaacatttcgagaaagta

SEQ ID NO: 1638 - DNA, 22 bp, Influenza A
ggaatccagaatgtgatatact

SEQ ID NO: 1639 - DNA, 21 bp, Influenza A
aaagattctgcccaaagatag

SEQ ID NO: 1640 - DNA, 19 bp, Influenza A
gaaaggggaccagatatgc

SEQ ID NO: 1641 - DNA, 20 bp, Influenza A
ccaaagatagatggacacag

SEQ ID NO: 1642 - DNA, 20 bp, Influenza A
attgaaacatctcctcacca

SEQ ID NO: 1643 - DNA, 19 bp, Influenza A
aactaaacggaatccctcc

SEQ ID NO: 1644 - DNA, 22 bp, Influenza A
aatgtgataggcttctaattgt

SEQ ID NO: 1645 - DNA, 19 bp, Influenza A
gcaaactaaacggaatccc

SEQ ID NO: 1646 - DNA, 18 bp, Influenza A
cccagcatacaacaactg

SEQ ID NO: 1647 - DNA, 20 bp, Influenza A
gaatccctccacttgaattg

SEQ ID NO: 1648 - DNA, 20 bp, Influenza A
aaagatagatggacacagca

SEQ ID NO: 1649 - DNA, 19 bp, Influenza A
aggacatccttgagaagac

SEQ ID NO: 1650 - DNA, 19 bp, Influenza A
agatagatggacacagcat

SEQ ID NO: 1651 - DNA, 21 bp, Influenza A
agaaaataaagattctgccca

SEQ ID NO: 1652 - DNA, 19 bp, Influenza A
ggacatccttgagaagacc

SEQ ID NO: 1653 - DNA, 19 bp, Influenza A
acttgaactaggggactgt

SEQ ID NO: 1654 - DNA, 20 bp, Influenza A
gatatgcattggataccact

SEQ ID NO: 1655 - DNA, 17 bp, Influenza A
gtgactcatgccaagga

SEQ ID NO: 1656 - DNA, 21 bp, Influenza A
aacaatcattcttcaggaaca

SEQ ID NO: 1657 - DNA, 20 bp, Influenza A
gtgataggcttctaagtgtg

SEQ ID NO: 1658 - DNA, 20 bp, Influenza A
aggttgacacaattctagag

SEQ ID NO: 1659 - DNA, 17 bp, Influenza A
acaactggaggttcacg

SEQ ID NO: 1660 - DNA, 20 bp, Influenza A
agattctgcccaaagataga

SEQ ID NO: 1661 - DNA, 21 bp, Influenza A
gtgaaacatttcgagaaagtg

SEQ ID NO: 1662 - DNA, 21 bp, Influenza A
aagttatgcaaactaaacgga

SEQ ID NO: 1663 - DNA, 17 bp, Influenza A
gactcatgccaaggaca

SEQ ID NO: 1664 - DNA, 19 bp, Influenza A
gaatggacacagcatacaa

SEQ ID NO: 1665 - DNA, 18 bp, Influenza A
aaacatctcctcagcagc

SEQ ID NO: 1666 - DNA, 20 bp, Influenza A
gacacagcatacaacaaatg

SEQ ID NO: 1667 - DNA, 19 bp, Influenza A
gtgataggcttctaagggt

SEQ ID NO: 1668 - DNA, 19 bp, Influenza A
attctagagcggaatgtca

SEQ ID NO: 1669 - DNA, 19 bp, Influenza A
agaagacccataacggaaa

SEQ ID NO: 1670 - DNA, 19 bp, Influenza A
cctccacttgaattagggg

SEQ ID NO: 1671 - DNA, 18 bp, Influenza A
aggggactgtagcattgc

SEQ ID NO: 1672 - DNA, 19 bp, Influenza A
acattcttgagaagaccca

SEQ ID NO: 1673 - DNA, 19 bp, Influenza A
acttgaactaggggactgc

SEQ ID NO: 1674 - DNA, 20 bp, Influenza A
gagaaagtaaggattctgcc

SEQ ID NO: 1675 - DNA, 20 bp, Influenza A
cgagaaagtaaggattctgc

SEQ ID NO: 1676 - DNA, 17 bp, Influenza A
agtgactcatgccaagg

SEQ ID NO: 1677 - DNA, 21 bp, Influenza A
caataattccacagagaaggt

SEQ ID NO: 1678 - DNA, 19 bp, Influenza A
aacccatcattcttcagga

SEQ ID NO: 1679 - DNA, 21 bp, Influenza A
ggaattgaaacatctcatcac

SEQ ID NO: 1680 - DNA, 21 bp, Influenza A
aggaattgaaacatctcatca

SEQ ID NO: 1681 - DNA, 18 bp, Influenza A
ctagagcggaatgtcact

SEQ ID NO: 1682 - DNA, 17 bp, Influenza A
caactggaggttcacgg

SEQ ID NO: 1683 - DNA, 18 bp, Influenza A
gacccagcatacaacaac

SEQ ID NO: 1684 - DNA, 20 bp, Influenza A
cttgaactaggggattgtag

SEQ ID NO: 1685 - DNA, 19 bp, Influenza A
acttgaactaggggattgt

SEQ ID NO: 1686 - DNA, 20 bp, Influenza A
aattcctccacttgaactag

SEQ ID NO: 1687 - DNA, 20 bp, Influenza A
aagctatgcaaactaaacgg

SEQ ID NO: 1688 - DNA, 17 bp, Influenza A
cactgtgactcatgcca

SEQ ID NO: 1689 - DNA, 17 bp, Influenza A
caactggaggttcacga

SEQ ID NO: 1690 - DNA, 20 bp, Influenza A
gaaccatcattcttcaggaa

SEQ ID NO: 1691 - DNA, 21 bp, Influenza A
aaggacattcttgagaaaacg

SEQ ID NO: 1692 - DNA, 18 bp, Influenza A
acatccttgagaagaccc

SEQ ID NO: 1693 - DNA, 22 bp, Influenza A
aaagtaaagattctgcctaaag

SEQ ID NO: 1694 - DNA, 20 bp, Influenza A
gtgataggcttctaagagtg

SEQ ID NO: 1695 - DNA, 17 bp, Influenza A
gaacatggtctggctga

SEQ ID NO: 1696 - DNA, 17 bp, Influenza A
acatggtctggctgaca

SEQ ID NO: 1697 - DNA, 19 bp, Influenza A
aaagtaaggattctgccca

SEQ ID NO: 1698 - DNA, 21 bp, Influenza A
ctggtaatccatcattcttca

SEQ ID NO: 1699 - DNA, 19 bp, Influenza A
gaggagaccagatatgcat

SEQ ID NO: 1700 - DNA, 19 bp, Influenza A
ccaggcagtttcaatgatt

SEQ ID NO: 1701 - DNA, 20 bp, Influenza A
acagtttgtgttatccaggc

SEQ ID NO: 1702 - DNA, 20 bp, Influenza A
gaagagttgaaacatctcct

SEQ ID NO: 1703 - DNA, 18 bp, Influenza A
gggattgtagcattgccg

SEQ ID NO: 1704 - DNA, 18 bp, Influenza A
agcgtgaaacatttcgag

SEQ ID NO: 1705 - DNA, 19 bp, Influenza A
acaacaaatggaggttcaa

SEQ ID NO: 1706 - DNA, 18 bp, Influenza A
ggggattgtagcattgcc

SEQ ID NO: 1707 - DNA, 17 bp, Influenza A
ggggggaccagatatgc

SEQ ID NO: 1708 - DNA, 21 bp, Influenza A
agattttgcccaaagatagat

SEQ ID NO: 1709 - DNA, 19 bp, Influenza A
gagaaagaaaacccgagag

SEQ ID NO: 1710 - DNA, 16 bp, Influenza A
atctcctcagcagcgt

SEQ ID NO: 1711 - DNA, 18 bp, Influenza A
caactggaggttcatggg

SEQ ID NO: 1712 - DNA, 17 bp, Influenza A
acatctcctcagcagcg

SEQ ID NO: 1713 - DNA, 19 bp, Influenza A
gacacaaatctagagcgga

SEQ ID NO: 1714 - DNA, 20 bp, Influenza A
ctatccaggcagtttcaatg

SEQ ID NO: 1715 - DNA, 17 bp, Influenza A
gactgtagcattgccgg

SEQ ID NO: 1716 - DNA, 19 bp, Influenza A
cagcgtaaaacatttcgag

SEQ ID NO: 1717 - DNA, 18 bp, Influenza A
ctcatcctcctgttcaca

SEQ ID NO: 1718 - DNA, 20 bp, Influenza A
cccaaagatagatggacaaa

SEQ ID NO: 1719 - DNA, 21 bp, Influenza A
ccaaaaatagatggacacagc

SEQ ID NO: 1720 - DNA, 17 bp, Influenza A
ctcctcagcagcgtaaa

SEQ ID NO: 1721 - DNA, 21 bp, Influenza A
aaagtaaaaattctgcccaaa

SEQ ID NO: 1722 - DNA, 19 bp, Influenza A
atggtctggttgacaaaga

SEQ ID NO: 1723 - DNA, 19 bp, Influenza A
agcagcgtaaaacatttcg

SEQ ID NO: 1724 - DNA, 19 bp, Influenza A
ggagaaagaaaacccgaaa

SEQ ID NO: 1725 - DNA, 20 bp, Influenza A
caacaattccacagaaaagg

SEQ ID NO: 1726 - DNA, 20 bp, Influenza A
aaagaaaacccgagatacag

SEQ ID NO: 1727 - DNA, 18 bp, Influenza A
atgcatcggataccatgc

SEQ ID NO: 1728 - DNA, 18 bp, Influenza A
ctcagcagcgtaaaacat

SEQ ID NO: 1729 - DNA, 19 bp, Influenza A
aaacatcttctcagcagcg

SEQ ID NO: 1730 - DNA, 19 bp, Influenza A
gaaagaaaacccgagagac

SEQ ID NO: 1731 - DNA, 17 bp, Influenza A
gggaccagatatgcgtt

SEQ ID NO: 1732 - DNA, 18 bp, Influenza A
cggaattcctccacttga

SEQ ID NO: 1733 - DNA, 20 bp, Influenza A
aggtaacccatcattcttca

SEQ ID NO: 1734 - DNA, 18 bp, Influenza A
ggaccagatatgcgttgg

SEQ ID NO: 1735 - DNA, 20 bp, Influenza A
gagaaagaaaacccgagaaa

SEQ ID NO: 1736 - DNA, 19 bp, Influenza A
actaaacggaattcctcca

SEQ ID NO: 1737 - DNA, 20 bp, Influenza A
ggacattcttgagaaaacgc

SEQ ID NO: 1738 - DNA, 18 bp, Influenza A
cccaaagataggtggaca

SEQ ID NO: 1739 - DNA, 18 bp, Influenza A
aggaacatgatctggctg

SEQ ID NO: 1740 - DNA, 20 bp, Influenza A
aggacatccttgagaaaacc

SEQ ID NO: 1741 - DNA, 20 bp, Influenza A
aacaattccacagaaaaggt

SEQ ID NO: 1742 - DNA, 18 bp, Influenza A
accatgccagtaattcca

SEQ ID NO: 1743 - DNA, 18 bp, Influenza A
gataggtggacacagcat

SEQ ID NO: 1744 - DNA, 20 bp, Influenza A
caggacattcttgagagaac

SEQ ID NO: 1745 - DNA, 25 bp, Influenza A
catcatttatctaattcttctgttc

SEQ ID NO: 1746 - DNA, 18 bp, Influenza A
aagatggatggacacagc

SEQ ID NO: 1747 - DNA, 18 bp, Influenza A
ctgcccaaagataggtgg

SEQ ID NO: 1748 - DNA, 17 bp, Influenza A
aactggaggttcacggg

SEQ ID NO: 1749 - DNA, 19 bp, Influenza A
gacggtttgtgttatccag

SEQ ID NO: 1750 - DNA, 23 bp, Influenza A
gccatcatttatctaattcttct

SEQ ID NO: 1751 - DNA, 20 bp, Influenza A
aaggggaccagatatgtatc

SEQ ID NO: 1752 - DNA, 19 bp, Influenza A
aattgaacggaatccctcc

SEQ ID NO: 1753 - DNA, 19 bp, Influenza A
aacggtttgtgttatccag

SEQ ID NO: 1754 - DNA, 20 bp, Influenza A
aattccacagaaaaagtcga

SEQ ID NO: 1755 - DNA, 19 bp, Influenza A
gccaaggacattcttgaaa

SEQ ID NO: 1756 - DNA, 20 bp, Influenza A
aggcagtttcaatgactatg

SEQ ID NO: 1757 - DNA, 18 bp, Influenza A
actagacggaatccctcc

SEQ ID NO: 1758 - DNA, 19 bp, Influenza A
attccacagagaaagtcga

SEQ ID NO: 1759 - DNA, 21 bp, Influenza A
caattctagagaggaatgtca

SEQ ID NO: 1760 - DNA, 18 bp, Influenza A
acccaggcagtttcaatg

SEQ ID NO: 1761 - DNA, 21 bp, Influenza A
gtctggtaatccatcattctt

SEQ ID NO: 1762 - DNA, 21 bp, Influenza A
aatggaaagttatgcaaactg

SEQ ID NO: 1763 - DNA, 19 bp, Influenza A
acttctaactgtgccagaa

SEQ ID NO: 1764 - DNA, 16 bp, Influenza A
acccaggcagcttcaa

SEQ ID NO: 1765 - DNA, 19 bp, Influenza A
gagacggtttgtgttatcc

SEQ ID NO: 1766 - DNA, 21 bp, Influenza A
caattctagagcgaaatgtca

SEQ ID NO: 1767 - DNA, 20 bp, Influenza A
ccaagaacatccttgagaag

SEQ ID NO: 1768 - DNA, 17 bp, Influenza A
cacagcagtgagaggag

SEQ ID NO: 1769 - DNA, 20 bp, Influenza A
gaaacggtttgtgttatcca

SEQ ID NO: 1770 - DNA, 19 bp, Influenza A
ggtgtctggtaatccatca

SEQ ID NO: 1771 - DNA, 15 bp, Influenza A
ggcctgcgcggtgtc

SEQ ID NO: 1772 - DNA, 15 bp, Influenza A
gggcctgcgcggtgt

SEQ ID NO: 1773 - DNA, 17 bp, Influenza A
agtgagaggggaccaga

SEQ ID NO: 1774 - DNA, 20 bp, Influenza A
aattcttctgttcacagcag

SEQ ID NO: 1775 - DNA, 20 bp, Influenza A
ataacgggaagttatgcaaa

SEQ ID NO: 1776 - DNA, 19 bp, Influenza A
actcatgccaagaacattc

SEQ ID NO: 1777 - DNA, 16 bp, Influenza A
cctcagcagcgtgaaa

SEQ ID NO: 1778 - DNA, 20 bp, Influenza A
cccataacggaaaattatgc

SEQ ID NO: 1779 - DNA, 22 bp, Influenza A
ctggtaatccatcatttttcag

SEQ ID NO: 1780 - DNA, 21 bp, Influenza A
caacaattccacagaaaaagt

SEQ ID NO: 1781 - DNA, 21 bp, Influenza A
aagatacagtttgtgttaccc

SEQ ID NO: 1782 - DNA, 20 bp, Influenza A
atacagtttgtgttacccag

SEQ ID NO: 1783 - DNA, 21 bp, Influenza A
aacaattccacagaaaaagtc

SEQ ID NO: 1784 - DNA, 20 bp, Influenza A
gatacagtttgtgttaccca

SEQ ID NO: 1785 - DNA, 20 bp, Influenza A
attccaacaattccacagaa

SEQ ID NO: 1786 - DNA, 17 bp, Influenza A
ctagagcggaacgtcac

SEQ ID NO: 1787 - DNA, 19 bp, Influenza A
acatccttgagaagaacca

SEQ ID NO: 1788 - DNA, 18 bp, Influenza A
aactggaggttcaaaggc

SEQ ID NO: 1789 - DNA, 17 bp, Influenza A
cgagagacggtttgtgt

SEQ ID NO: 1790 - DNA, 17 bp, Influenza A
cccgagagacggtttgt

SEQ ID NO: 1791 - DNA, 22 bp, Influenza A
ggagaaagaaaatccaagatac

SEQ ID NO: 1792 - DNA, 17 bp, Influenza A
cgcggtgtctggtaatc

SEQ ID NO: 1793 - DNA, 18 bp, Influenza A
cagagatggtcgacacaa

SEQ ID NO: 1794 - DNA, 17 bp, Influenza A
aggattgtttggggcaa

SEQ ID NO: 1795 - DNA, 19 bp, Influenza A
gagaaggtcgacacaaatc

SEQ ID NO: 1796 - DNA, 19 bp, Influenza A
ccgtcattcttcagaaaca

SEQ ID NO: 1797 - DNA, 16 bp, Influenza A
agcggaacgtcactgt

SEQ ID NO: 1798 - DNA, 23 bp, Influenza A
actttgagaaagttaagattctg

SEQ ID NO: 1799 - DNA, 18 bp, Influenza A
agtgaaaggggaccaaat

SEQ ID NO: 1800 - DNA, 19 bp, Influenza A
agcgtaaaacacttcgaga

SEQ ID NO: 1801 - DNA, 17 bp, Influenza A
gaggggggaccagatat

SEQ ID NO: 1802 - DNA, 15 bp, Influenza A
aggttcacgggcctg

SEQ ID NO: 1803 - DNA, 19 bp, Influenza A
ctcctcagtagcgtaaaac

SEQ ID NO: 1804 - DNA, 19 bp, Influenza A
acccgagatacagtttgtg

SEQ ID NO: 1805 - DNA, 18 bp, Influenza A
aatccgagagacggtttg

SEQ ID NO: 1806 - DNA, 23 bp, Influenza A
acactttgagaaagttaagattc

SEQ ID NO: 1807 - DNA, 19 bp, Influenza A
gctatgcaaactagacgga

SEQ ID NO: 1808 - DNA, 17 bp, Influenza A
ggcttctaagggtgcca

SEQ ID NO: 1809 - DNA, 21 bp, Influenza A
caaaccatcattcttcagaaa

SEQ ID NO: 1810 - DNA, 17 bp, Influenza A
aggcttctaagggtgcc

SEQ ID NO: 1811 - DNA, 20 bp, Influenza A
aataattccacagaaacggt

SEQ ID NO: 1812 - DNA, 16 bp, Influenza A
aaacccgagagacggt

SEQ ID NO: 1813 - DNA, 15 bp, Influenza A
ggttcacgggcctgt

SEQ ID NO: 1814 - DNA, 19 bp, Influenza A
attaagattctgcccaggg

SEQ ID NO: 1815 - DNA, 21 bp, Influenza A
gaaatacagtttgtgttaccc

SEQ ID NO: 1816 - DNA, 21 bp, Influenza A
gaaagaaaatccaaggaatgg

SEQ ID NO: 1817 - DNA, 15 bp, Influenza A
gcgcggtgtctggta

SEQ ID NO: 1818 - DNA, 19 bp, Influenza A
ggggaccaaatatgtatcg

SEQ ID NO: 1819 - DNA, 21 bp, Influenza A
gaaaacccaagatacagtttg

SEQ ID NO: 1820 - DNA, 21 bp, Influenza A
ccgaaatacagtttgtgttac

SEQ ID NO: 1821 - DNA, 19 bp, Influenza A
cgtgacacactttgagaaa

SEQ ID NO: 1822 - DNA, 15 bp, Influenza A
agtgaggggggacca

SEQ ID NO: 1823 - DNA, 21 bp, Influenza A
aaagaaaatccaaggaatggt

SEQ ID NO: 1824 - DNA, 18 bp, Influenza A
cagtagtgaaaggggacc

SEQ ID NO: 1825 - DNA, 18 bp, Influenza A
cacagtagtgaaagggga

SEQ ID NO: 1826 - DNA, 18 bp, Influenza A
ccaggcagcttaaatgac

SEQ ID NO: 1827 - DNA, 21 bp, Influenza A
aaattaagattctgcccagag

SEQ ID NO: 1828 - DNA, 20 bp, Influenza A
ggtgaaccatcattcttcag

SEQ ID NO: 1829 - DNA, 20 bp, Influenza A
aagaaaatccaaggaatggt

SEQ ID NO: 1830 - DNA, 21 bp, Influenza A
atccaagatacagtttgtgtt

SEQ ID NO: 1831 - DNA, 20 bp, Influenza A
aattaagattctgcccagag

SEQ ID NO: 1832 - DNA, 17 bp, Influenza A
ctatgctacccaggcag

SEQ ID NO: 1833 - DNA, 18 bp, Influenza A
cagcgtgacacattttga

SEQ ID NO: 1834 - DNA, 19 bp, Influenza A
acaatagtgaaaggggacc

SEQ ID NO: 1835 - DNA, 21 bp, Influenza A
gaaagaaaacccgaaatacag

SEQ ID NO: 1836 - DNA, 22 bp, Influenza A
ctgtgagaaagttaagattctg

SEQ ID NO: 1837 - DNA, 17 bp, Influenza A
aggggattgcagcattg

SEQ ID NO: 1838 - DNA, 18 bp, Influenza A
cccaggcagcttaaatga

SEQ ID NO: 1839 - DNA, 20 bp, Influenza A
aaaagtcgacacaatcttgg

SEQ ID NO: 1840 - DNA, 16 bp, Influenza A
gggggattgcagcatt

SEQ ID NO: 1841 - DNA, 22 bp, Influenza A
gaaagaaaatccaagaaatggt

SEQ ID NO: 1842 - DNA, 18 bp, Influenza A
gtagcattgcaggttggc

SEQ ID NO: 1843 - DNA, 20 bp, Influenza A
gaaagtcgacacaatcttgg

SEQ ID NO: 1844 - DNA, 21 bp, Influenza A
gagaaaattaagattctgccc

SEQ ID NO: 1845 - DNA, 24 bp, Influenza A
ctttgagaaaattaagattctacc

SEQ ID NO: 1846 - DNA, 22 bp, Influenza A
attcttgagaaaacgcataatg

SEQ ID NO: 1847 - DNA, 20 bp, Influenza A
agaaagtcgacacaatcttg

SEQ ID NO: 1848 - DNA, 21 bp, Influenza A
acttgaattaggggattgtag

SEQ ID NO: 1849 - DNA, 18 bp, Influenza A
cgacacaatcttggagcg

SEQ ID NO: 1850 - DNA, 22 bp, Influenza A
attcttcaggaatatggtttgg

SEQ ID NO: 1851 - DNA, 18 bp, Influenza A
gacacaatcttggagcga

SEQ ID NO: 1852 - DNA, 20 bp, Influenza A
gagaaagtcgacacaatctt

SEQ ID NO: 1853 - DNA, 18 bp, Influenza A
acacaatcttggagcgaa

SEQ ID NO: 1854 - DNA, 20 bp, Influenza A
gaagttgtgcagattaagcg

SEQ ID NO: 1855 - DNA, 18 bp, Influenza A
agtcgacacaatcttgga

SEQ ID NO: 1856 - DNA, 20 bp, Influenza A
aaaaagtcgacacaatcttg

SEQ ID NO: 1857 - DNA, 19 bp, Influenza A
gagatcaatggactcagca

SEQ ID NO: 1858 - DNA, 19 bp, Influenza A
aagttgtgcagattaagcg

SEQ ID NO: 1859 - DNA, 24 bp, Influenza A
agaatgtgatatacttctaactgt

SEQ ID NO: 1860 - DNA, 18 bp, Influenza A
gaaatccggaatgtgacc

SEQ ID NO: 1861 - DNA, 19 bp, Influenza A
aactgaatggaatccctcc

SEQ ID NO: 1862 - DNA, 16 bp, Influenza A
gattgcagcattgcgg

SEQ ID NO: 1863 - DNA, 19 bp, Influenza A
acaatcttggagcgaaacg

SEQ ID NO: 1864 - DNA, 21 bp, Influenza A
ctcttaagtgtacctgaatgg

SEQ ID NO: 1865 - DNA, 22 bp, Influenza A
aaagacaatgactatcactttt

SEQ ID NO: 1866 - DNA, 22 bp, Influenza A
aagacaatgactatcacttttc

SEQ ID NO: 1867 - DNA, 18 bp, Influenza A
aacaactggtggttctcg

SEQ ID NO: 1868 - DNA, 20 bp, Influenza A
ccaaatatgtatcgggtacc

SEQ ID NO: 1869 - DNA, 22 bp, Influenza A
gaaattatgcaaactgaatgga

SEQ ID NO: 1870 - DNA, 18 bp, Influenza A
caacaactggtggttctc

SEQ ID NO: 1871 - DNA, 18 bp, Influenza A
caatcttggagcgaaacg

SEQ ID NO: 1872 - DNA, 18 bp, Influenza A
agttgtgcagattaagcg

SEQ ID NO: 1873 - DNA, 18 bp, Influenza A
acaacaactggtggttct

SEQ ID NO: 1874 - DNA, 21 bp, Influenza A
aaattatgcaaactgaatgga

SEQ ID NO: 1875 - DNA, 17 bp, Influenza A
ggaggttcaaaggcctg

SEQ ID NO: 1876 - DNA, 18 bp, Influenza A
gacaactggtggttctcg

SEQ ID NO: 1877 - DNA, 19 bp, Influenza A
gacttctaactgtgccaga

SEQ ID NO: 1878 - DNA, 17 bp, Influenza A
ctggaggttcaaaggcc

SEQ ID NO: 1879 - DNA, 20 bp, Influenza A
acattcttgagaaaatgcac

SEQ ID NO: 1880 - DNA, 23 bp, Influenza A
catcatttatctaatccttctgt

SEQ ID NO: 1881 - DNA, 18 bp, Influenza A
caaggaatggtttgtgct

SEQ ID NO: 1882 - DNA, 19 bp, Influenza A
atcactttcctcatcctcc

SEQ ID NO: 1883 - DNA, 19 bp, Influenza A
agacttctaactgtgccag

SEQ ID NO: 1884 - DNA, 17 bp, Influenza A
cattgcaggttggctcc

SEQ ID NO: 1885 - DNA, 19 bp, Influenza A
ccagagatcaatggactca

SEQ ID NO: 1886 - DNA, 18 bp, Influenza A
ggaatccctccattggaa

SEQ ID NO: 1887 - DNA, 20 bp, Influenza A
gatagacttctaactgtgcc

SEQ ID NO: 1888 - DNA, 18 bp, Influenza A
aatccggaatgtgatcgg

SEQ ID NO: 1889 - DNA, 19 bp, Influenza A
acttgaattgggggattgc

SEQ ID NO: 1890 - DNA, 19 bp, Influenza A
caacaactggtggttctag

SEQ ID NO: 1891 - DNA, 20 bp, Influenza A
aatgggaagttatgcaaact

SEQ ID NO: 1892 - DNA, 18 bp, Influenza A
cccagagatcaatggacc

SEQ ID NO: 1893 - DNA, 21 bp, Influenza A
ctatcacttttctcatcctcc

SEQ ID NO: 1894 - DNA, 19 bp, Influenza A
gatcaatggactcagcaca

SEQ ID NO: 1895 - DNA, 22 bp, Influenza A
cttcaatgcttatgaggaattg

SEQ ID NO: 1896 - DNA, 20 bp, Influenza A
agacaatgaccatcactttc

SEQ ID NO: 1897 - DNA, 16 bp, Influenza A
gcaggttggctccttg

SEQ ID NO: 1898 - DNA, 16 bp, Influenza A
caggttggctccttgg

SEQ ID NO: 1899 - DNA, 17 bp, Influenza A
agcagcgtgacacattt

SEQ ID NO: 1900 - DNA, 16 bp, Influenza A
ctggtggttctcgggc

SEQ ID NO: 1901 - DNA, 16 bp, Influenza A
actggtggttctcggg

SEQ ID NO: 1902 - DNA, 17 bp, Influenza A
cttggagcgaaacgtca

SEQ ID NO: 1903 - DNA, 25 bp, Influenza A
gacacattttgataaaataaagatt

SEQ ID NO: 1904 - DNA, 16 bp, Influenza A
agcattgcaggttggc

SEQ ID NO: 1905 - DNA, 18 bp, Influenza A
catctcctcaccagtgtg

SEQ ID NO: 1906 - DNA, 20 bp, Influenza A
acccgagatacagtttatgt

SEQ ID NO: 1907 - DNA, 17 bp, Influenza A
cgacaactggtggttct

SEQ ID NO: 1908 - DNA, 18 bp, Influenza A
gctcttaagtgtgcctga

SEQ ID NO: 1909 - DNA, 22 bp, Influenza A
cagagtggtcatatataatgga

SEQ ID NO: 1910 - DNA, 20 bp, Influenza A
aacaactggagattcaaagg

SEQ ID NO: 1911 - DNA, 16 bp, Influenza A
cagcagcgtgacacat

SEQ ID NO: 1912 - DNA, 20 bp, Influenza A
aaagacaatgaccatcactt

SEQ ID NO: 1913 - DNA, 15 bp, Influenza A
ggtggttctcgggcc

SEQ ID NO: 1914 - DNA, 17 bp, Influenza A
atcttggagcgaaacgt

SEQ ID NO: 1915 - DNA, 22 bp, Influenza A
cacactttgagaaagttaagat

SEQ ID NO: 1916 - DNA, 18 bp, Influenza A
acgctcaggacattcttg

SEQ ID NO: 1917 - DNA, 17 bp, Influenza A
caacattgcaggttggc

SEQ ID NO: 1918 - DNA, 20 bp, Influenza A
gaaagacaatgaccatcact

SEQ ID NO: 1919 - DNA, 18 bp, Influenza A
ctatcttggagcgaaacg

SEQ ID NO: 1920 - DNA, 21 bp, Influenza A
ctagagagaaatgtcactgtg

SEQ ID NO: 1921 - DNA, 16 bp, Influenza A
ggagcgaaacgtcacc

SEQ ID NO: 1922 - DNA, 16 bp, Influenza A
gagcgaaacgtcaccg

SEQ ID NO: 1923 - DNA, 22 bp, Influenza A
attcttgaaaaaacgcataatg

SEQ ID NO: 1924 - DNA, 19 bp, Influenza A
gaggattttgcccaaagat

SEQ ID NO: 1925 - DNA, 18 bp, Influenza A
agaaaaggaaaacccggc

SEQ ID NO: 1926 - DNA, 19 bp, Influenza A
agattaagcggaatccctc

SEQ ID NO: 1927 - DNA, 21 bp, Influenza A
attcttgagaagactcacaat

SEQ ID NO: 1928 - DNA, 17 bp, Influenza A
cacaatcttggagcgga

SEQ ID NO: 1929 - DNA, 18 bp, Influenza A
aagttgtgcagattgagc

SEQ ID NO: 1930 - DNA, 19 bp, Influenza A
cagggtgacacattttgag

SEQ ID NO: 1931 - DNA, 16 bp, Influenza A
agggcctgtgcagtat

SEQ ID NO: 1932 - DNA, 16 bp, Influenza A
gacccatgccaaggac

SEQ ID NO: 1933 - DNA, 16 bp, Influenza A
agcgaaacgtcaccgt

SEQ ID NO: 1934 - DNA, 19 bp, Influenza A
gagaaaacgcataatggga

SEQ ID NO: 1935 - DNA, 21 bp, Influenza A
gactcacaatggaaagttatg

SEQ ID NO: 1936 - DNA, 17 bp, Influenza A
attgcagcattgcaggt

SEQ ID NO: 1937 - DNA, 25 bp, Influenza A
aatccagaatgtaatatacttctaa

SEQ ID NO: 1938 - DNA, 21 bp, Influenza A
caatggaaagttatgcagatt

SEQ ID NO: 1939 - DNA, 22 bp, Influenza A
aattctagagagaaatgtcact

SEQ ID NO: 1940 - DNA, 21 bp, Influenza A
gaattgaaacacctccttagt

SEQ ID NO: 1941 - DNA, 19 bp, Influenza A
aacgcataatgggaagttg

SEQ ID NO: 1942 - DNA, 21 bp, Influenza A
cttttctcatcctcctattca

SEQ ID NO: 1943 - DNA, 18 bp, Influenza A
agtgtcaggcaaaccatc

SEQ ID NO: 1944 - DNA, 19 bp, Influenza A
gaattaagggattgcagca

SEQ ID NO: 1945 - DNA, 20 bp, Influenza A
ccctccacttgaattaagag

SEQ ID NO: 1946 - DNA, 20 bp, Influenza A
gaaacacctccttagtagtg

SEQ ID NO: 1947 - DNA, 20 bp, Influenza A
accatcacttttctcatcct

SEQ ID NO: 1948 - DNA, 16 bp, Influenza A
atcgggtaccatgcca

SEQ ID NO: 1949 - DNA, 20 bp, Influenza A
gaagctatgcaaactgaatg

SEQ ID NO: 1950 - DNA, 18 bp, Influenza A
gaaaatccaaggaacggc

SEQ ID NO: 1951 - DNA, 21 bp, Influenza A
aatccaagaaatggtttgtgt

SEQ ID NO: 1952 - DNA, 19 bp, Influenza A
acatatcctcaccagtgtg

SEQ ID NO: 1953 - DNA, 18 bp, Influenza A
agaagaaccacaacggaa

SEQ ID NO: 1954 - DNA, 18 bp, Influenza A
gactcagcacacaacaac

SEQ ID NO: 1955 - DNA, 20 bp, Influenza A
ctagagagaaacgtcactgt

SEQ ID NO: 1956 - DNA, 17 bp, Influenza A
ctggaggttcacaggct

SEQ ID NO: 1957 - DNA, 17 bp, Influenza A
aatggactcagcacacg

SEQ ID NO: 1958 - DNA, 16 bp, Influenza A
ggaaaacccggcgaat

SEQ ID NO: 1959 - DNA, 16 bp, Influenza A
aaacccggcgaatggt

SEQ ID NO: 1960 - DNA, 19 bp, Influenza A
atcaatggacccagcatac

SEQ ID NO: 1961 - DNA, 19 bp, Influenza A
gaaaacgcacaatggaaag

SEQ ID NO: 1962 - DNA, 17 bp, Influenza A
gatcaatggacccagca

SEQ ID NO: 1963 - DNA, 18 bp, Influenza A
ggatcaatggactcagca

SEQ ID NO: 1964 - DNA, 22 bp, Influenza A
aagaaaatccaagatacagttt

SEQ ID NO: 1965 - DNA, 15 bp, Influenza A
ctgcgcggtgtcagg

SEQ ID NO: 1966 - DNA, 15 bp, Influenza A
aggaaaacccggcga

SEQ ID NO: 1967 - DNA, 20 bp, Influenza A
ctcttaagtgtaccggaatg

SEQ ID NO: 1968 - DNA, 17 bp, Influenza A
ggaggttcacaggcttg

SEQ ID NO: 1969 - DNA, 16 bp, Influenza A
ggaatgtgaccggctc

SEQ ID NO: 1970 - DNA, 18 bp, Influenza A
ctcagcagagtgacacat

SEQ ID NO: 1971 - DNA, 19 bp, Influenza A
accggctcttaaatgtacc

SEQ ID NO: 1972 - DNA, 17 bp, Influenza A
atccggaatgtgatcgg

SEQ ID NO: 1973 - DNA, 15 bp, Influenza A
cggaatgtgaccggc

SEQ ID NO: 1974 - DNA, 25 bp, Influenza A
aaaagtttctttagtagattgaatt

SEQ ID NO: 1975 - DNA, 24 bp, Influenza A
cagtttctttagtagattgaattg

SEQ ID NO: 1976 - DNA, 21 bp, Influenza A
caactgttacccttatgatgt

SEQ ID NO: 1977 - DNA, 25 bp, Influenza A
ataaaagtttctttagtagattgaa

SEQ ID NO: 1978 - DNA, 27 bp, Influenza A
atctattaaaagtttctttagtagatt

SEQ ID NO: 1979 - DNA, 21 bp, Influenza A
gactgttacccttatgatgtg

SEQ ID NO: 1980 - DNA, 20 bp, Influenza A
actgttacccttatgatgtg

SEQ ID NO: 1981 - DNA, 23 bp, Influenza A
ggtttctttagtagattgaattg

SEQ ID NO: 1982 - DNA, 20 bp, Influenza A
gcaactgttacccttatgat

SEQ ID NO: 1983 - DNA, 22 bp, Influenza A
aaattgaagtgactaatgctac

SEQ ID NO: 1984 - DNA, 23 bp, Influenza A
ctttagtagattgaattggttga

SEQ ID NO: 1985 - DNA, 21 bp, Influenza A
actgatagatgctctattggg

SEQ ID NO: 1986 - DNA, 20 bp, Influenza A
gtgactatgccaaacaatga

SEQ ID NO: 1987 - DNA, 22 bp, Influenza A
aattgaagtgactaatgctact

SEQ ID NO: 1988 - DNA, 23 bp, Influenza A
cttctttagtagattgaattggt

SEQ ID NO: 1989 - DNA, 20 bp, Influenza A
ctcccttaggtcactagttg

SEQ ID NO: 1990 - DNA, 23 bp, Influenza A
acagtttctttagtagattgaat

SEQ ID NO: 1991 - DNA, 25 bp, Influenza A
gatctgttaaaagtttctttagtag

SEQ ID NO: 1992 - DNA, 22 bp, Influenza A
aattgttacccttatgatgtgc

SEQ ID NO: 1993 - DNA, 23 bp, Influenza A
gatcaaattgaagtgactaatgc

SEQ ID NO: 1994 - DNA, 20 bp, Influenza A
ctgttacccttatgatgtgt

SEQ ID NO: 1995 - DNA, 23 bp, Influenza A
aacagtttctttagtagattgaa

SEQ ID NO: 1996 - DNA, 20 bp, Influenza A
ctgatagatgctctattggg

SEQ ID NO: 1997 - DNA, 20 bp, Influenza A
atagatgctctattgggaga

SEQ ID NO: 1998 - DNA, 21 bp, Influenza A
ctagtgaaaacaatcacgaat

SEQ ID NO: 1999 - DNA, 19 bp, Influenza A
cccttaggtcactagttgc

SEQ ID NO: 2000 - DNA, 20 bp, Influenza A
atcccttaggtcactagttg

SEQ ID NO: 2001 - DNA, 21 bp, Influenza A
caaattgaagtgactaatgct

SEQ ID NO: 2002 - DNA, 19 bp, Influenza A
cctcccttaggtcactagt

SEQ ID NO: 2003 - DNA, 22 bp, Influenza A
atcaaattgaagtgactaatgc

SEQ ID NO: 2004 - DNA, 23 bp, Influenza A
atgatcaaattgaagtgactaat

SEQ ID NO: 2005 - DNA, 19 bp, Influenza A
gattatgcctcccttaggt

SEQ ID NO: 2006 - DNA, 21 bp, Influenza A
aaaaaactgcacactgataga

SEQ ID NO: 2007 - DNA, 21 bp, Influenza A
gattgaagtgactaatgctac

SEQ ID NO: 2008 - DNA, 19 bp, Influenza A
ggattatgcctcccttagg

SEQ ID NO: 2009 - DNA, 19 bp, Influenza A
actgcacactgatagatgc

SEQ ID NO: 2010 - DNA, 18 bp, Influenza A
gtacatttggggggttca

SEQ ID NO: 2011 - DNA, 22 bp, Influenza A
caattgttacccttatgatgtg

SEQ ID NO: 2012 - DNA, 21 bp, Influenza A
ccaaattgaagtgactaatgc

SEQ ID NO: 2013 - DNA, 21 bp, Influenza A
ctgttacccttatgatgtacc

SEQ ID NO: 2014 - DNA, 22 bp, Influenza A
cattgatagatgctctattggg

SEQ ID NO: 2015 - DNA, 20 bp, Influenza A
gctagtgaaaacaatcacga

SEQ ID NO: 2016 - DNA, 20 bp, Influenza A
agctgttacccttatgatgt

SEQ ID NO: 2017 - DNA, 20 bp, Influenza A
gaatgggacctttttgttga

SEQ ID NO: 2018 - DNA, 27 bp, Influenza A
atctaataaaagtttctttagtagatt

SEQ ID NO: 2019 - DNA, 24 bp, Influenza A
agatctgttaaaagtttctttagt

SEQ ID NO: 2020 - DNA, 20 bp, Influenza A
gtagatgctctattgggaga

SEQ ID NO: 2021 - DNA, 20 bp, Influenza A
aaaaactgcacactgataga

SEQ ID NO: 2022 - DNA, 19 bp, Influenza A
gtcactagttgcctcatcc

SEQ ID NO: 2023 - DNA, 18 bp, Influenza A
attgtacatttggggggt

SEQ ID NO: 2024 - DNA, 19 bp, Influenza A
agatgctctattgggagac

SEQ ID NO: 2025 - DNA, 19 bp, Influenza A
gtcactagttgcctcatca

SEQ ID NO: 2026 - DNA, 19 bp, Influenza A
ctctattgggagaccctca

SEQ ID NO: 2027 - DNA, 23 bp, Influenza A
agcttctttagtagattgaattg

SEQ ID NO: 2028 - DNA, 26 bp, Influenza A
ctaataacagtttctttagtagattg

SEQ ID NO: 2029 - DNA, 19 bp, Influenza A
gagaccctcattgtgatgg

SEQ ID NO: 2030 - DNA, 19 bp, Influenza A
ggacctttttgttgaacgc

SEQ ID NO: 2031 - DNA, 19 bp, Influenza A
ctacagcaactgttaccct

SEQ ID NO: 2032 - DNA, 22 bp, Influenza A
aacaaattgaagtgactaatgc

SEQ ID NO: 2033 - DNA, 25 bp, Influenza A
ccattaaaagtttctttagtagatt

SEQ ID NO: 2034 - DNA, 22 bp, Influenza A
attcctcaacaggtagaatatg

SEQ ID NO: 2035 - DNA, 19 bp, Influenza A
ctattgggagaccctcatt

SEQ ID NO: 2036 - DNA, 21 bp, Influenza A
accaaattgaagtgactaatg

SEQ ID NO: 2037 - DNA, 21 bp, Influenza A
agattgaagtgactaatgcta

SEQ ID NO: 2038 - DNA, 19 bp, Influenza A
cttcaattggactggagtg

SEQ ID NO: 2039 - DNA, 19 bp, Influenza A
cttacagcaactgttaccc

SEQ ID NO: 2040 - DNA, 19 bp, Influenza A
actaatgctactgagctgg

SEQ ID NO: 2041 - DNA, 19 bp, Influenza A
ctaatgctactgagctggt

SEQ ID NO: 2042 - DNA, 19 bp, Influenza A
gactgcacactgatagatg

SEQ ID NO: 2043 - DNA, 20 bp, Influenza A
gatagatgctctattggggg

SEQ ID NO: 2044 - DNA, 20 bp, Influenza A
aacttcaattggactggagt

SEQ ID NO: 2045 - DNA, 18 bp, Influenza A
ggtcactagttgcctcat

SEQ ID NO: 2046 - DNA, 19 bp, Influenza A
aggattatgcctcccttag

SEQ ID NO: 2047 - DNA, 20 bp, Influenza A
cttcccttaggtcactagtt

SEQ ID NO: 2048 - DNA, 25 bp, Influenza A
ctgataaaagtttctttagtagatt

SEQ ID NO: 2049 - DNA, 20 bp, Influenza A
attcaattggactggagtca

SEQ ID NO: 2050 - DNA, 18 bp, Influenza A
gcttcaattggactggag

SEQ ID NO: 2051 - DNA, 19 bp, Influenza A
gcttacagcaactgttacc

SEQ ID NO: 2052 - DNA, 18 bp, Influenza A
cggattatgcctccctta

SEQ ID NO: 2053 - DNA, 21 bp, Influenza A
cagttgttacccttatgatgt

SEQ ID NO: 2054 - DNA, 24 bp, Influenza A
aacaaaagtttctttagtagattg

SEQ ID NO: 2055 - DNA, 22 bp, Influenza A
cagtagattgaattggttgtac

SEQ ID NO: 2056 - DNA, 19 bp, Influenza A
gagaccctcattgtgatga

SEQ ID NO: 2057 - DNA, 19 bp, Influenza A
ctctattgggagaccctct

SEQ ID NO: 2058 - DNA, 19 bp, Influenza A
atgggacctttttgttgag

SEQ ID NO: 2059 - DNA, 18 bp, Influenza A
ctttttgttgaacgcagc

SEQ ID NO: 2060 - DNA, 19 bp, Influenza A
ggatgctctattgggagac

SEQ ID NO: 2061 - DNA, 19 bp, Influenza A
ggaacgctagtgaaaacaa

SEQ ID NO: 2062 - DNA, 19 bp, Influenza A
atcactagttgcctcatcc

SEQ ID NO: 2063 - DNA, 20 bp, Influenza A
cctcaacaggtagaatatgc

SEQ ID NO: 2064 - DNA, 18 bp, Influenza A
ggagaccctcattgtgat

SEQ ID NO: 2065 - DNA, 20 bp, Influenza A
cttcaattggactggagtag

SEQ ID NO: 2066 - DNA, 20 bp, Influenza A
ctcaacaggtagaatatgcg

SEQ ID NO: 2067 - DNA, 21 bp, Influenza A
ctgttacccttatgatatgcc

SEQ ID NO: 2068 - DNA, 19 bp, Influenza A
caaactgcacactgataga

SEQ ID NO: 2069 - DNA, 18 bp, Influenza A
acctttttgttgaacgca

SEQ ID NO: 2070 - DNA, 23 bp, Influenza A
caaattgaagttactaatgctac

SEQ ID NO: 2071 - DNA, 21 bp, Influenza A
aaaataaggaatgggaccttt

SEQ ID NO: 2072 - DNA, 22 bp, Influenza A
gaatgtaccagaaaaacaaact

SEQ ID NO: 2073 - DNA, 19 bp, Influenza A
cattgtgatggcttccaaa

SEQ ID NO: 2074 - DNA, 20 bp, Influenza A
aacaggtagaatatgcgaca

SEQ ID NO: 2075 - DNA, 20 bp, Influenza A
cagattatgcctcccttagg

SEQ ID NO: 2076 - DNA, 20 bp, Influenza A
gaaagcttcaattggactgg

SEQ ID NO: 2077 - DNA, 19 bp, Influenza A
agcttacagcaactgttac

SEQ ID NO: 2078 - DNA, 19 bp, Influenza A
ggaatgggacctttttgtt

SEQ ID NO: 2079 - DNA, 20 bp, Influenza A
gaaatgggacctttttgttg

SEQ ID NO: 2080 - DNA, 22 bp, Influenza A
caaatccttgatggaaaaaact

SEQ ID NO: 2081 - DNA, 22 bp, Influenza A
agtagattgaattggttgtacg

SEQ ID NO: 2082 - DNA, 19 bp, Influenza A
ggttcagagttcctcaaca

SEQ ID NO: 2083 - DNA, 22 bp, Influenza A
agtagattgaattggttgtacc

SEQ ID NO: 2084 - DNA, 19 bp, Influenza A
aaagcttcaattggactgg

SEQ ID NO: 2085 - DNA, 19 bp, Influenza A
aggaatgggacctttttgt

SEQ ID NO: 2086 - DNA, 23 bp, Influenza A
acaatgaaaaatttgacaaattg

SEQ ID NO: 2087 - DNA, 17 bp, Influenza A
gcctcccttaggtcact

SEQ ID NO: 2088 - DNA, 18 bp, Influenza A
caattggactggagtcgc

SEQ ID NO: 2089 - DNA, 22 bp, Influenza A
attgaagttactaatgctactg

SEQ ID NO: 2090 - DNA, 19 bp, Influenza A
gaatatgcgacagtcctca

SEQ ID NO: 2091 - DNA, 24 bp, Influenza A
attaaaatacaaatatccagcact

SEQ ID NO: 2092 - DNA, 21 bp, Influenza A
aactgtaacccttatgatgtg

SEQ ID NO: 2093 - DNA, 19 bp, Influenza A
attgaacgtgactatgcca

SEQ ID NO: 2094 - DNA, 21 bp, Influenza A
aaactgcacactaatagatgc

SEQ ID NO: 2095 - DNA, 17 bp, Influenza A
cccttatgatgtgccgg

SEQ ID NO: 2096 - DNA, 19 bp, Influenza A
agacttcaattggactgga

SEQ ID NO: 2097 - DNA, 21 bp, Influenza A
cgaatccttgatggaaaaaac

SEQ ID NO: 2098 - DNA, 18 bp, Influenza A
acccttatgatgtgccag

SEQ ID NO: 2099 - DNA, 21 bp, Influenza A
ctcccttagatcactagttgc

SEQ ID NO: 2100 - DNA, 21 bp, Influenza A
gtaactaatgctactgagctg

SEQ ID NO: 2101 - DNA, 24 bp, Influenza A
aaattagaatacaaatatccagca

SEQ ID NO: 2102 - DNA, 20 bp, Influenza A
gccgaataagcatctattgg

SEQ ID NO: 2103 - DNA, 20 bp, Influenza A
ctagtgaaaacaatcacgga

SEQ ID NO: 2104 - DNA, 21 bp, Influenza A
cagattgaagtgactaatgct

SEQ ID NO: 2105 - DNA, 21 bp, Influenza A
cctcaacaggtagaatatgtg

SEQ ID NO: 2106 - DNA, 18 bp, Influenza A
atgctactgagctggttc

SEQ ID NO: 2107 - DNA, 19 bp, Influenza A
agaatatgcgacagtcctc

SEQ ID NO: 2108 - DNA, 22 bp, Influenza A
gaatgatcaaattgaagtgact

SEQ ID NO: 2109 - DNA, 25 bp, Influenza A
atccattaaaagtttctttagtaga

SEQ ID NO: 2110 - DNA, 20 bp, Influenza A
ctgcacactaatagatgctc

SEQ ID NO: 2111 - DNA, 21 bp, Influenza A
gcaactgttatccttatgatg

SEQ ID NO: 2112 - DNA, 20 bp, Influenza A
ctcaacaggtagaatatgca

SEQ ID NO: 2113 - DNA, 24 bp, Influenza A
ccaattaaaatacaaatatccagc

SEQ ID NO: 2114 - DNA, 18 bp, Influenza A
caaacggaacgctagtga

SEQ ID NO: 2115 - DNA, 19 bp, Influenza A
cagctatgcttgcaaaagg

SEQ ID NO: 2116 - DNA, 20 bp, Influenza A
atagaatatgcgacagtcct

SEQ ID NO: 2117 - DNA, 18 bp, Influenza A
cggaacgctagtgaaaac

SEQ ID NO: 2118 - DNA, 18 bp, Influenza A
aacggaacgctagtgaaa

SEQ ID NO: 2119 - DNA, 17 bp, Influenza A
ccttatgatgtgccgga

SEQ ID NO: 2120 - DNA, 20 bp, Influenza A
agtgactaatgctactgaac

SEQ ID NO: 2121 - DNA, 19 bp, Influenza A
gtagaatatgcgacagtcc

SEQ ID NO: 2122 - DNA, 18 bp, Influenza A
cctcattgtgatggcttc

SEQ ID NO: 2123 - DNA, 19 bp, Influenza A
acaggtagaatatgcgaca

SEQ ID NO: 2124 - DNA, 20 bp, Influenza A
gaagacttcaattggactgg

SEQ ID NO: 2125 - DNA, 21 bp, Influenza A
ataagaaatgggacctttttg

SEQ ID NO: 2126 - DNA, 23 bp, Influenza A
attaaaatacaaatatccagcgc

SEQ ID NO: 2127 - DNA, 20 bp, Influenza A
ctgttacccttatgaagtgc

SEQ ID NO: 2128 - DNA, 21 bp, Influenza A
acagcaactgttatccttatg

SEQ ID NO: 2129 - DNA, 21 bp, Influenza A
attatacctcccttaggtcac

SEQ ID NO: 2130 - DNA, 20 bp, Influenza A
cagattatgcctcccttaga

SEQ ID NO: 2131 - DNA, 18 bp, Influenza A
aggcttcaattggactgg

SEQ ID NO: 2132 - DNA, 22 bp, Influenza A
aaatacaaatatccagcactga

SEQ ID NO: 2133 - DNA, 19 bp, Influenza A
gagttcctcaacaggtaga

SEQ ID NO: 2134 - DNA, 17 bp, Influenza A
atgcctcccttaggtca

SEQ ID NO: 2135 - DNA, 19 bp, Influenza A
agttcctcaacaggtagaa

SEQ ID NO: 2136 - DNA, 19 bp, Influenza A
gaaatgacaacagcacagc

SEQ ID NO: 2137 - DNA, 18 bp, Influenza A
ctgagctggttcagagtt

SEQ ID NO: 2138 - DNA, 20 bp, Influenza A
ctgctacccttatgatgtgc

SEQ ID NO: 2139 - DNA, 21 bp, Influenza A
gaaaaaactgcacactgatag

SEQ ID NO: 2140 - DNA, 19 bp, Influenza A
aggaaatgacaacagcaca

SEQ ID NO: 2141 - DNA, 18 bp, Influenza A
gagctggttcagagttcc

SEQ ID NO: 2142 - DNA, 21 bp, Influenza A
aattgaggtgactaatgctac

SEQ ID NO: 2143 - DNA, 19 bp, Influenza A
aatatgcgacagtcctcat

SEQ ID NO: 2144 - DNA, 20 bp, Influenza A
ctgtaacccttatgatgtgc

SEQ ID NO: 2145 - DNA, 18 bp, Influenza A
ggcttcaattggactggg

SEQ ID NO: 2146 - DNA, 19 bp, Influenza A
caattggactggagtcact

SEQ ID NO: 2147 - DNA, 20 bp, Influenza A
actgcacactaatagatgct

SEQ ID NO: 2148 - DNA, 20 bp, Influenza A
aaaacaatcacgaatgacca

SEQ ID NO: 2149 - DNA, 20 bp, Influenza A
aaaacttcaattggactgga

SEQ ID NO: 2150 - DNA, 18 bp, Influenza A
agctggttcagagttcct

SEQ ID NO: 2151 - DNA, 20 bp, Influenza A
caagattatgcctcccttag

SEQ ID NO: 2152 - DNA, 20 bp, Influenza A
aatgaaggcttcaattggac

SEQ ID NO: 2153 - DNA, 22 bp, Influenza A
aaaatacaaatatccagcactg

SEQ ID NO: 2154 - DNA, 20 bp, Influenza A
ctcccttaggtcactaattg

SEQ ID NO: 2155 - DNA, 21 bp, Influenza A
aacaatcacgaatgatcaaat

SEQ ID NO: 2156 - DNA, 19 bp, Influenza A
agacttcaattggactggg

SEQ ID NO: 2157 - DNA, 20 bp, Influenza A
gattatgcctcccttagatc

SEQ ID NO: 2158 - DNA, 19 bp, Influenza A
gcttcccttaggtcactag

SEQ ID NO: 2159 - DNA, 22 bp, Influenza A
aatcacgaatgatcaaattgaa

SEQ ID NO: 2160 - DNA, 20 bp, Influenza A
aactgttacccctatgatgt

SEQ ID NO: 2161 - DNA, 18 bp, Influenza A
gcttcaattggactgggg

SEQ ID NO: 2162 - DNA, 23 bp, Influenza A
ctgttaaaagtttcttcagtaga

SEQ ID NO: 2163 - DNA, 20 bp, Influenza A
acttcaattggactggaatc

SEQ ID NO: 2164 - DNA, 21 bp, Influenza A
atatctcccttaggtcactaa

SEQ ID NO: 2165 - DNA, 20 bp, Influenza A
cttaggtcactaattgcctc

SEQ ID NO: 2166 - DNA, 18 bp, Influenza A
cactagttgcctcatccg

SEQ ID NO: 2167 - DNA, 22 bp, Influenza A
aaatgatcaaattgaagtgact

SEQ ID NO: 2168 - DNA, 25 bp, Influenza A
gatctgataaaagtttctttagtaa

SEQ ID NO: 2169 - DNA, 21 bp, Influenza A
aaactgcacacttatagatgc

SEQ ID NO: 2170 - DNA, 21 bp, Influenza A
aaacaatcacgaatgatcaga

SEQ ID NO: 2171 - DNA, 25 bp, Influenza A
gatccattaaaagtttctttagtag

SEQ ID NO: 2172 - DNA, 18 bp, Influenza A
atatgcgacagtcctcac

SEQ ID NO: 2173 - DNA, 20 bp, Influenza A
actaatgctactgagctagt

SEQ ID NO: 2174 - DNA, 18 bp, Influenza A
cttcccggaaatgacaac

SEQ ID NO: 2175 - DNA, 21 bp, Influenza A
atcaatgaaggcttcaattgg

SEQ ID NO: 2176 - DNA, 21 bp, Influenza A
agttactaatgctactgagct

SEQ ID NO: 2177 - DNA, 18 bp, Influenza A
cggattatgcctcccttc

SEQ ID NO: 2178 - DNA, 19 bp, Influenza A
ccaacaggtagaatatgcg

SEQ ID NO: 2179 - DNA, 19 bp, Influenza A
caacaggtagaatatgcgg

SEQ ID NO: 2180 - DNA, 20 bp, Influenza A
ataaggaatgggaccttttc

SEQ ID NO: 2181 - DNA, 19 bp, Influenza A
ggacttcaattggactggg

SEQ ID NO: 2182 - DNA, 20 bp, Influenza A
agattgaagtgactaatgcc

SEQ ID NO: 2183 - DNA, 21 bp, Influenza A
ctaatgctactgagctagttc

SEQ ID NO: 2184 - DNA, 17 bp, Influenza A
aattggactggagtcgc

SEQ ID NO: 2185 - DNA, 19 bp, Influenza A
atgcttgcaaaaggagatc

SEQ ID NO: 2186 - DNA, 20 bp, Influenza A
gagaaatgggacctttttgt

SEQ ID NO: 2187 - DNA, 19 bp, Influenza A
aaagcttacagcaactgtt

SEQ ID NO: 2188 - DNA, 17 bp, Influenza A
cggtcactagttgcctc

SEQ ID NO: 2189 - DNA, 21 bp, Influenza A
attgtgatggctttcaaaata

SEQ ID NO: 2190 - DNA, 21 bp, Influenza A
cgaatgatcaaattgaagtga

SEQ ID NO: 2191 - DNA, 20 bp, Influenza A
gtgactaatgctactgaact

SEQ ID NO: 2192 - DNA, 21 bp, Influenza A
gattgaggtgactaatgctac

SEQ ID NO: 2193 - DNA, 22 bp, Influenza A
aaaaaactgcacactaatagat

SEQ ID NO: 2194 - DNA, 21 bp, Influenza A
cctggagtttaacaatgaaag

SEQ ID NO: 2195 - DNA, 19 bp, Influenza A
ggagttcctcaacaggtag

SEQ ID NO: 2196 - DNA, 20 bp, Influenza A
gattatgcttcccttaggtc

SEQ ID NO: 2197 - DNA, 24 bp, Influenza A
caaattagaatacaaatatccagc

SEQ ID NO: 2198 - DNA, 18 bp, Influenza A
actagttgcctcatccgg

SEQ ID NO: 2199 - DNA, 19 bp, Influenza A
gcagctgttacccttatga

SEQ ID NO: 2200 - DNA, 19 bp, Influenza A
ctgttacccgtatgatgtg

SEQ ID NO: 2201 - DNA, 19 bp, Influenza A
agttcctcaacaggtagac

SEQ ID NO: 2202 - DNA, 20 bp, Influenza A
ctcccttaggtcattagttg

SEQ ID NO: 2203 - DNA, 21 bp, Influenza A
acggtttctttagtagattga

SEQ ID NO: 2204 - DNA, 18 bp, Influenza A
caatgctactgagctggt

SEQ ID NO: 2205 - DNA, 20 bp, Influenza A
gattatgcatcccttaggtc

SEQ ID NO: 2206 - DNA, 18 bp, Influenza A
cttcaattggactggggt

SEQ ID NO: 2207 - DNA, 20 bp, Influenza A
ctctattgggagaccctaat

SEQ ID NO: 2208 - DNA, 20 bp, Influenza A
caaatatccagcactgaacg

SEQ ID NO: 2209 - DNA, 20 bp, Influenza A
gattgaattggttgcacaaa

SEQ ID NO: 2210 - DNA, 21 bp, Influenza A
acagtttcttcagtagattga

SEQ ID NO: 2211 - DNA, 18 bp, Influenza A
cctcaccgaatccttgat

SEQ ID NO: 2212 - DNA, 21 bp, Influenza A
agactgcacactaatagatgc

SEQ ID NO: 2213 - DNA, 18 bp, Influenza A
caccgaatccttgatgga

SEQ ID NO: 2214 - DNA, 22 bp, Influenza A
atggcttccaaaataagaaatg

SEQ ID NO: 2215 - DNA, 21 bp, Influenza A
cacgaatgatcaaattgaagt

SEQ ID NO: 2216 - DNA, 19 bp, Influenza A
gctttcagcaactgttacc

SEQ ID NO: 2217 - DNA, 23 bp, Influenza A
aaaggggatctattaaaagtttc

SEQ ID NO: 2218 - DNA, 21 bp, Influenza A
gaaaacaatcacgaatgaaca

SEQ ID NO: 2219 - DNA, 21 bp, Influenza A
acgaatgatcaaattgaagtg

SEQ ID NO: 2220 - DNA, 21 bp, Influenza A
gaatacaaatatccagcactg

SEQ ID NO: 2221 - DNA, 21 bp, Influenza A
gatggcttccaaaataagaaa

SEQ ID NO: 2222 - DNA, 18 bp, Influenza A
acttcccggaaatgacaa

SEQ ID NO: 2223 - DNA, 24 bp, Influenza A
agatctgataaaagtttctttagt

SEQ ID NO: 2224 - DNA, 19 bp, Influenza A
atgaaggcttcaattggac

SEQ ID NO: 2225 - DNA, 21 bp, Influenza A
aatgggatctttttgttgaac

SEQ ID NO: 2226 - DNA, 21 bp, Influenza A
atacaaatatccagcactgac

SEQ ID NO: 2227 - DNA, 18 bp, Influenza A
gaacgcagcaaagcttac

SEQ ID NO: 2228 - DNA, 25 bp, Influenza A
acaaattagaatacaaatatccaga

SEQ ID NO: 2229 - DNA, 19 bp, Influenza A
actgttacccgtatgatgt

SEQ ID NO: 2230 - DNA, 19 bp, Influenza A
ccttcagcaactgttaccc

SEQ ID NO: 2231 - DNA, 20 bp, Influenza A
cctcccttagatcactagtt

SEQ ID NO: 2232 - DNA, 20 bp, Influenza A
attatgcctcccttagatca

SEQ ID NO: 2233 - DNA, 20 bp, Influenza A
gatctttttgttgaacgcag

SEQ ID NO: 2234 - DNA, 20 bp, Influenza A
ggattatacctcccttaggt

SEQ ID NO: 2235 - DNA, 19 bp, Influenza A
aggtttcaattggactgga

SEQ ID NO: 2236 - DNA, 21 bp, Influenza A
cttcccttaggtcactaattg

SEQ ID NO: 2237 - DNA, 22 bp, Influenza A
aaaatacaaatatccagcacag

SEQ ID NO: 2238 - DNA, 19 bp, Influenza A
atgtctcccttaggtcact

SEQ ID NO: 2239 - DNA, 20 bp, Influenza A
accctggagtttaacaatga

SEQ ID NO: 2240 - DNA, 22 bp, Influenza A
attgtgatggtttccaaaataa

SEQ ID NO: 2241 - DNA, 18 bp, Influenza A
aatgacaacagcacagca

SEQ ID NO: 2242 - DNA, 19 bp, Influenza A
caaaagaagccagcaaact

SEQ ID NO: 2243 - DNA, 21 bp, Influenza A
cttatgatgtgcaggattatg

SEQ ID NO: 2244 - DNA, 19 bp, Influenza A
aatgggaccttttcgttga

SEQ ID NO: 2245 - DNA, 17 bp, Influenza A
cggattatgcctccctc

SEQ ID NO: 2246 - DNA, 17 bp, Influenza A
cggattatgcctccctg

SEQ ID NO: 2247 - DNA, 19 bp, Influenza A
gagaaaactgcacactgat

SEQ ID NO: 2248 - DNA, 20 bp, Influenza A
aacaatcacgaatgatcaga

SEQ ID NO: 2249 - DNA, 22 bp, Influenza A
agtgaaaacaataacgaatgat

SEQ ID NO: 2250 - DNA, 20 bp, Influenza A
caccctggagtttaacaatg

SEQ ID NO: 2251 - DNA, 18 bp, Influenza A
gctactgagctggttcat

SEQ ID NO: 2252 - DNA, 22 bp, Influenza A
agtgaaaacaataacgaatgac

SEQ ID NO: 2253 - DNA, 21 bp, Influenza A
gaatccttgatggagaaaact

SEQ ID NO: 2254 - DNA, 19 bp, Influenza A
gaacgtgagtatgccaaac

SEQ ID NO: 2255 - DNA, 19 bp, Influenza A
gcaactgctacccttatga

SEQ ID NO: 2256 - DNA, 19 bp, Influenza A
gcaactgttacccctatga

SEQ ID NO: 2257 - DNA, 18 bp, Influenza A
gcaaagcttacagcaact

SEQ ID NO: 2258 - DNA, 17 bp, Influenza A
accctcattgtgatggc

SEQ ID NO: 2259 - DNA, 19 bp, Influenza A
aactggttcagagttcctc

SEQ ID NO: 2260 - DNA, 18 bp, Influenza A
actggttcagagttcctc

SEQ ID NO: 2261 - DNA, 20 bp, Influenza A
gagaccctcattgtgatagc

SEQ ID NO: 2262 - DNA, 19 bp, Influenza A
cccttaggtccctagttgc

SEQ ID NO: 2263 - DNA, 20 bp, Influenza A
cgaatccttgatggagaaaa

SEQ ID NO: 2264 - DNA, 18 bp, Influenza A
ccgaatccttgatggaga

SEQ ID NO: 2265 - DNA, 20 bp, Influenza A
gacctttttattgaacgcag

SEQ ID NO: 2266 - DNA, 22 bp, Influenza A
acactgatagatgctttattgg

SEQ ID NO: 2267 - DNA, 21 bp, Influenza A
ataaatatccagcactgaacg

SEQ ID NO: 2268 - DNA, 18 bp, Influenza A
ctcaggtcactagttgcc

SEQ ID NO: 2269 - DNA, 20 bp, Influenza A
agattatgcatcccttaggt

SEQ ID NO: 2270 - DNA, 21 bp, Influenza A
cagattatacctcccttaggt

SEQ ID NO: 2271 - DNA, 22 bp, Influenza A
attatatctcccttaggtcact

SEQ ID NO: 2272 - DNA, 20 bp, Influenza A
actaatgctactgaactggt

SEQ ID NO: 2273 - DNA, 18 bp, Influenza A
ctctattgggagaccccc

SEQ ID NO: 2274 - DNA, 24 bp, Influenza A
gatgatcaaattgaagtaactaat

SEQ ID NO: 2275 - DNA, 23 bp, Influenza A
aaaacaatcacaaatgatcaaat

SEQ ID NO: 2276 - DNA, 20 bp, Influenza A
ctaatgctactgaactggtt

SEQ ID NO: 2277 - DNA, 23 bp, Influenza A
agttagaatacaaatatccagcg

SEQ ID NO: 2278 - DNA, 17 bp, Influenza A
ctagttgcctcatccgg

SEQ ID NO: 2279 - DNA, 18 bp, Influenza A
ggtttcaattggactggg

SEQ ID NO: 2280 - DNA, 18 bp, Influenza A
cactattgggagaccctc

SEQ ID NO: 2281 - DNA, 19 bp, Influenza A
gatagacgctctattggga

SEQ ID NO: 2282 - DNA, 18 bp, Influenza A
gacagtcctcaccgaatc

SEQ ID NO: 2283 - DNA, 21 bp, Influenza A
atcacgaatgatcaaattgag

SEQ ID NO: 2284 - DNA, 20 bp, Influenza A
atgggacctttttgtagaac

SEQ ID NO: 2285 - DNA, 19 bp, Influenza A
agcattgaacgtgactatg

SEQ ID NO: 2286 - DNA, 21 bp, Influenza A
aacaggtagaatatgcgatag

SEQ ID NO: 2287 - DNA, 19 bp, Influenza A
agactgcacactgatagat

SEQ ID NO: 2288 - DNA, 18 bp, Influenza A
gatgctctattgggggac

SEQ ID NO: 2289 - DNA, 19 bp, Influenza A
aaggtttcaattggactgg

SEQ ID NO: 2290 - DNA, 19 bp, Influenza A
atatgcgacagtcctcatc

SEQ ID NO: 2291 - DNA, 17 bp, Influenza A
atgtgccggattatgcc

SEQ ID NO: 2292 - DNA, 20 bp, Influenza A
ctcggggttatttcaaaatg

SEQ ID NO: 2293 - DNA, 23 bp, Influenza A
caattacaatacaaatatccagc

SEQ ID NO: 2294 - DNA, 18 bp, Influenza A
atgctctattgggggacc

SEQ ID NO: 2295 - DNA, 21 bp, Influenza A
atgatcaaattgaagtgacca

SEQ ID NO: 2296 - DNA, 20 bp, Influenza A
agattgaattggttgtacga

SEQ ID NO: 2297 - DNA, 19 bp, Influenza A
aaaatatgcgacagtcctc

SEQ ID NO: 2298 - DNA, 22 bp, Influenza A
aacaaactgtaattccgaatat

SEQ ID NO: 2299 - DNA, 21 bp, Influenza A
cagaatacaaatatccagcgc

SEQ ID NO: 2300 - DNA, 20 bp, Influenza A
ctaatgctactgagttggtt

SEQ ID NO: 2301 - DNA, 18 bp, Influenza A
ggaccctcattgtgatgt

SEQ ID NO: 2302 - DNA, 19 bp, Influenza A
gatttcaattggactgggg

SEQ ID NO: 2303 - DNA, 21 bp, Influenza A
aaaattgcacactgatagatg

SEQ ID NO: 2304 - DNA, 23 bp, Influenza A
gatctgttaagagtttctttagt

SEQ ID NO: 2305 - DNA, 23 bp, Influenza A
acactgaaaaatttgacaaattg

SEQ ID NO: 2306 - DNA, 19 bp, Influenza A
agattgaattggttgaccc

SEQ ID NO: 2307 - DNA, 20 bp, Influenza A
gagttcctcaacaggtaaaa

SEQ ID NO: 2308 - DNA, 22 bp, Influenza A
ggagatctgttaaaagtttctt

SEQ ID NO: 2309 - DNA, 22 bp, Influenza A
aatcagaatacaaatatccagc

SEQ ID NO: 2310 - DNA, 21 bp, Influenza A
ccagaatacaaatatccagca

SEQ ID NO: 2311 - DNA, 19 bp, Influenza A
gaccctcattgtgatgact

SEQ ID NO: 2312 - DNA, 23 bp, Influenza A
gatggctttcaaaataagaaatg

SEQ ID NO: 2313 - DNA, 21 bp, Influenza A
ggatgatcaaattgaagtgac

SEQ ID NO: 2314 - DNA, 19 bp, Influenza A
cctccctaaggtcactagt

SEQ ID NO: 2315 - DNA, 18 bp, Influenza A
agagttcctcaacaggtc

SEQ ID NO: 2316 - DNA, 20 bp, Influenza A
agaatacaaatatccagcgc

SEQ ID NO: 2317 - DNA, 22 bp, Influenza A
ctaatagatgctttattgggag

SEQ ID NO: 2318 - DNA, 20 bp, Influenza A
ccttatgatgtgcaggatta

SEQ ID NO: 2319 - DNA, 20 bp, Influenza A
gaatacaaatatccagcgct

SEQ ID NO: 2320 - DNA, 19 bp, Influenza A
attgaattggttgcaccag

SEQ ID NO: 2321 - DNA, 19 bp, Influenza A
gcctctcttaggtcactag

SEQ ID NO: 2322 - DNA, 18 bp, Influenza A
ccctagttgcctcatcag

SEQ ID NO: 2323 - DNA, 18 bp, Influenza A
gggaccttttcgttgaac

SEQ ID NO: 2324 - DNA, 18 bp, Influenza A
ctatgcgacagtcctcac

SEQ ID NO: 2325 - DNA, 19 bp, Influenza A
ggtctctagttgcctcatc

SEQ ID NO: 2326 - DNA, 19 bp, Influenza A
agttggttcagagttcctc

SEQ ID NO: 2327 - DNA, 17 bp, Influenza A
atgcgacagtcctcacc

SEQ ID NO: 2328 - DNA, 17 bp, Influenza A
gctactgagctggttcg

SEQ ID NO: 2329 - DNA, 18 bp, Influenza A
agctctgcttgcaaaagg

SEQ ID NO: 2330 - DNA, 21 bp, Influenza A
aataaactgcacactgataga

SEQ ID NO: 2331 - DNA, 20 bp, Influenza A
aatcacgaatgaccaaattg

SEQ ID NO: 2332 - DNA, 20 bp, Influenza A
ccttatgatgtgctggatta

SEQ ID NO: 2333 - DNA, 21 bp, Influenza A
agaaaactgcacactaataga

SEQ ID NO: 2334 - DNA, 17 bp, Influenza A
ccatgcagtgccaaacg

SEQ ID NO: 2335 - DNA, 18 bp, Influenza A
gagaccctcattgtgacg

SEQ ID NO: 2336 - DNA, 17 bp, Influenza A
aatgacaacagcacggc

SEQ ID NO: 2337 - DNA, 21 bp, Influenza A
caacaggtagaatatgtgaca

SEQ ID NO: 2338 - DNA, 20 bp, Influenza A
gtaaactgcacactgataga

SEQ ID NO: 2339 - DNA, 19 bp, Influenza A
cagaacgctagtgaaaaca

SEQ ID NO: 2340 - DNA, 17 bp, Influenza A
gctggttcagagttccc

SEQ ID NO: 2341 - DNA, 18 bp, Influenza A
aaaacggaacgctagtga

SEQ ID NO: 2342 - DNA, 19 bp, Influenza A
agtgttgaacgtgactatg

SEQ ID NO: 2343 - DNA, 22 bp, Influenza A
gtaactaatgctactgaactgg

SEQ ID NO: 2344 - DNA, 22 bp, Influenza A
aaaataaggaatgggatctttt

SEQ ID NO: 2345 - DNA, 20 bp, Influenza A
gaaaaaactgcacactgatg

SEQ ID NO: 2346 - DNA, 18 bp, Influenza A
cccttaggtcgctagttg

SEQ ID NO: 2347 - DNA, 20 bp, Influenza A
aactaatgctactgaactgg

SEQ ID NO: 2348 - DNA, 19 bp, Influenza A
aagctttgcttgcaaaagg

SEQ ID NO: 2349 - DNA, 21 bp, Influenza A
caacaggtagaatatgcaaca

SEQ ID NO: 2350 - DNA, 20 bp, Influenza A
ctaatgctactgaactggtc

SEQ ID NO: 2351 - DNA, 19 bp, Influenza A
atgctactgagctagttca

SEQ ID NO: 2352 - DNA, 20 bp, Influenza A
ctagtgagaacaatcacgaa

SEQ ID NO: 2353 - DNA, 19 bp, Influenza A
aacaggtagaatatgcggc

SEQ ID NO: 2354 - DNA, 19 bp, Influenza A
gctctattgggagatcctc

SEQ ID NO: 2355 - DNA, 19 bp, Influenza A
aatatgcaacagtcctcac

SEQ ID NO: 2356 - DNA, 21 bp, Influenza A
gtgatgacttccaaaataagg

SEQ ID NO: 2357 - DNA, 17 bp, Influenza A
ccctattgggagaccct

SEQ ID NO: 2358 - DNA, 19 bp, Influenza A
gtgactaatgccactgagc

SEQ ID NO: 2359 - DNA, 19 bp, Influenza A
ctctattgggagaccttca

SEQ ID NO: 2360 - DNA, 18 bp, Influenza A
ggcaccctggagtttatc

SEQ ID NO: 2361 - DNA, 20 bp, Influenza A
catgggacctttttgtagag

SEQ ID NO: 2362 - DNA, 19 bp, Influenza A
gatggcttccaaaatgaga

SEQ ID NO: 2363 - DNA, 17 bp, Influenza A
gggagaccctcattgtg

SEQ ID NO: 2364 - DNA, 19 bp, Influenza A
gggggtacttcaaaatacg

SEQ ID NO: 2365 - DNA, 19 bp, Influenza A
gaagcgactaatgctactg

SEQ ID NO: 2366 - DNA, 18 bp, Influenza A
ggaatgacaacagcacag

SEQ ID NO: 2367 - DNA, 20 bp, Influenza A
ctctattgggagatcctcat

SEQ ID NO: 2368 - DNA, 20 bp, Influenza A
ctggttcagatttcctcaac

SEQ ID NO: 2369 - DNA, 18 bp, Influenza A
atgggacctttttgtcga

SEQ ID NO: 2370 - DNA, 19 bp, Influenza A
ctaattgtgatggcttcca

SEQ ID NO: 2371 - DNA, 18 bp, Influenza A
actgtgatggcttccaaa

SEQ ID NO: 2372 - DNA, 21 bp, Influenza A
cctggagtttatcaatgaaga

SEQ ID NO: 2373 - DNA, 17 bp, Influenza A
cgctagttgcctcatcc

SEQ ID NO: 2374 - DNA, 19 bp, Influenza A
gccaacaatgggaaatttg

SEQ ID NO: 2375 - DNA, 21 bp, Influenza A
agaatgggatgtcttcataga

SEQ ID NO: 2376 - DNA, 22 bp, Influenza A
aatgggaaatttgagttcattg

SEQ ID NO: 2377 - DNA, 19 bp, Influenza A
ccaacaatgggaaattcga

SEQ ID NO: 2378 - DNA, 21 bp, Influenza A
acaatgggaaatttgagttca

SEQ ID NO: 2379 - DNA, 20 bp, Influenza A
catttgaatggtgcagaatg

SEQ ID NO: 2380 - DNA, 22 bp, Influenza A
gacacttgttatccatttgatg

SEQ ID NO: 2381 - DNA, 21 bp, Influenza A
acacttgttatccatttgatg

SEQ ID NO: 2382 - DNA, 20 bp, Influenza A
gaagaattccaatggaacac

SEQ ID NO: 2383 - DNA, 21 bp, Influenza A
cttgttatccatttgatgtgc

SEQ ID NO: 2384 - DNA, 19 bp, Influenza A
gcagaatgggatgtcttca

SEQ ID NO: 2385 - DNA, 20 bp, Influenza A
gaattccaatggaacacagt

SEQ ID NO: 2386 - DNA, 18 bp, Influenza A
gcatactcgccaacaatg

SEQ ID NO: 2387 - DNA, 18 bp, Influenza A
atactcgccaacaatggg

SEQ ID NO: 2388 - DNA, 19 bp, Influenza A
aagcaaaatgggaaatccg

SEQ ID NO: 2389 - DNA, 19 bp, Influenza A
agagggcaaatgtgaatga

SEQ ID NO: 2390 - DNA, 19 bp, Influenza A
caatgcagtagacacttgc

SEQ ID NO: 2391 - DNA, 19 bp, Influenza A
ctgtgatatgcatgggaca

SEQ ID NO: 2392 - DNA, 19 bp, Influenza A
agcatacttgccaacaatg

SEQ ID NO: 2393 - DNA, 20 bp, Influenza A
attagtggaatcgcaacatc

SEQ ID NO: 2394 - DNA, 20 bp, Influenza A
gacacttgctatccatttga

SEQ ID NO: 2395 - DNA, 20 bp, Influenza A
cccaggaattagtggaatcg

SEQ ID NO: 2396 - DNA, 19 bp, Influenza A
atcacttgaatggtgcaga

SEQ ID NO: 2397 - DNA, 20 bp, Influenza A
agacacttgctatccatttg

SEQ ID NO: 2398 - DNA, 19 bp, Influenza A
gtgatatgcatgggacatc

SEQ ID NO: 2399 - DNA, 20 bp, Influenza A
gaaatcctgtgatatgcctg

SEQ ID NO: 2400 - DNA, 18 bp, Influenza A
ctgagaagcatactcgcc

SEQ ID NO: 2401 - DNA, 19 bp, Influenza A
ccaggaattagtggaatcg

SEQ ID NO: 2402 - DNA, 19 bp, Influenza A
aatcctgtgatatgcctgg

SEQ ID NO: 2403 - DNA, 21 bp, Influenza A
agcaaatgtgaatgacttttt

SEQ ID NO: 2404 - DNA, 18 bp, Influenza A
gggacaatggtgaaaacc

SEQ ID NO: 2405 - DNA, 21 bp, Influenza A
caaaagagcaaatgtgaatga

SEQ ID NO: 2406 - DNA, 19 bp, Influenza A
ggatgtcttcatagagcga

SEQ ID NO: 2407 - DNA, 19 bp, Influenza A
gaatcctgtgatatgcctg

SEQ ID NO: 2408 - DNA, 18 bp, Influenza A
atccaatgggacaatggt

SEQ ID NO: 2409 - DNA, 21 bp, Influenza A
gaaatttgagttcattgctga

SEQ ID NO: 2410 - DNA, 18 bp, Influenza A
cactgcccaggaattagt

SEQ ID NO: 2411 - DNA, 19 bp, Influenza A
ggatgtcttcatagagcgg

SEQ ID NO: 2412 - DNA, 18 bp, Influenza A
atcctgtgatatgcctgg

SEQ ID NO: 2413 - DNA, 20 bp, Influenza A
gcaaaagagcaaatgtgaat

SEQ ID NO: 2414 - DNA, 20 bp, Influenza A
agagcaaatgtgaatgactt

SEQ ID NO: 2415 - DNA, 20 bp, Influenza A
aagagcaaatgtgaatgact

SEQ ID NO: 2416 - DNA, 20 bp, Influenza A
ggcaaatgtgaatgactttt

SEQ ID NO: 2417 - DNA, 20 bp, Influenza A
gagcaaatgtgaatgacttt

SEQ ID NO: 2418 - DNA, 22 bp, Influenza A
agccctttaagattagtagatg

SEQ ID NO: 2419 - DNA, 19 bp, Influenza A
gatgtcttcatagagcggc

SEQ ID NO: 2420 - DNA, 19 bp, Influenza A
cttgtgacatcgtcaatgg

SEQ ID NO: 2421 - DNA, 20 bp, Influenza A
gagcaaatgtgaatgacttc

SEQ ID NO: 2422 - DNA, 19 bp, Influenza A
gtcactgcccaagaattag

SEQ ID NO: 2423 - DNA, 22 bp, Influenza A
aaatgtgaatgactttttcaac

SEQ ID NO: 2424 - DNA, 19 bp, Influenza A
atgcaaaagagcaaatgtg

SEQ ID NO: 2425 - DNA, 22 bp, Influenza A
aatgtgaatgactttttcaaca

SEQ ID NO: 2426 - DNA, 19 bp, Influenza A
ctgtggacacttgttaccc

SEQ ID NO: 2427 - DNA, 17 bp, Influenza A
acatcgtcaatggtgct

SEQ ID NO: 2428 - DNA, 18 bp, Influenza A
cattcgatgtgccagact

SEQ ID NO: 2429 - DNA, 19 bp, Influenza A
atggtgaaaaccttgactg

SEQ ID NO: 2430 - DNA, 19 bp, Influenza A
gcatgcaaaagagcaaatg

SEQ ID NO: 2431 - DNA, 19 bp, Influenza A
cttgctacccattcgatgt

SEQ ID NO: 2432 - DNA, 19 bp, Influenza A
catgcaaaagagcaaatgt

SEQ ID NO: 2433 - DNA, 18 bp, Influenza A
cttcatagagcgacccac

SEQ ID NO: 2434 - DNA, 18 bp, Influenza A
gggaaccctgtgatatgc

SEQ ID NO: 2435 - DNA, 21 bp, Influenza A
gtatcttagcaaacaatggga

SEQ ID NO: 2436 - DNA, 20 bp, Influenza A
cttgttacccatttgatgtg

SEQ ID NO: 2437 - DNA, 22 bp, Influenza A
aatggaaaatttgagttcattg

SEQ ID NO: 2438 - DNA, 17 bp, Influenza A
acatcgtcaatggtgcc

SEQ ID NO: 2439 - DNA, 18 bp, Influenza A
agaatgggaaatccggag

SEQ ID NO: 2440 - DNA, 18 bp, Influenza A
cagaatgggaaatccgga

SEQ ID NO: 2441 - DNA, 21 bp, Influenza A
ctctcagaattacacaggaaa

SEQ ID NO: 2442 - DNA, 19 bp, Influenza A
aacaaaatgggaaatccgg

SEQ ID NO: 2443 - DNA, 18 bp, Influenza A
gtgacatcgtcaatggtg

SEQ ID NO: 2444 - DNA, 18 bp, Influenza A
agaagtagtcactgccca

SEQ ID NO: 2445 - DNA, 17 bp, Influenza A
agtggaatcgcaacacc

SEQ ID NO: 2446 - DNA, 21 bp, Influenza A
cttagcaaacaatgggaaatt

SEQ ID NO: 2447 - DNA, 18 bp, Influenza A
cgtggacacttgttaccc

SEQ ID NO: 2448 - DNA, 19 bp, Influenza A
caatagacacttgctaccc

SEQ ID NO: 2449 - DNA, 19 bp, Influenza A
ggagcatcttagcaaacaa

SEQ ID NO: 2450 - DNA, 20 bp, Influenza A
atttgagttcattgctgagg

SEQ ID NO: 2451 - DNA, 17 bp, Influenza A
atcgcaacatctaccgg

SEQ ID NO: 2452 - DNA, 20 bp, Influenza A
atcttagcaaacaatgggaa

SEQ ID NO: 2453 - DNA, 17 bp, Influenza A
ctgctgtggacacttgt

SEQ ID NO: 2454 - DNA, 18 bp, Influenza A
cggaattgtgtcctagcc

SEQ ID NO: 2455 - DNA, 23 bp, Influenza A
ctttaagattagtagatggacaa

SEQ ID NO: 2456 - DNA, 18 bp, Influenza A
agcatgcaaaagagcaaa

SEQ ID NO: 2457 - DNA, 19 bp, Influenza A
gctgaatgggatgtcttca

SEQ ID NO: 2458 - DNA, 17 bp, Influenza A
actgctgtggacacttg

SEQ ID NO: 2459 - DNA, 17 bp, Influenza A
aatggtgctctgggaag

SEQ ID NO: 2460 - DNA, 17 bp, Influenza A
agttgtgtcctagccct

SEQ ID NO: 2461 - DNA, 18 bp, Influenza A
gcaacatctaccggagtt

SEQ ID NO: 2462 - DNA, 19 bp, Influenza A
agtagatgggcaaacttgt

SEQ ID NO: 2463 - DNA, 18 bp, Influenza A
ggccaaacttgtgacatc

SEQ ID NO: 2464 - DNA, 17 bp, Influenza A
cctgtgatatgcctggg

SEQ ID NO: 2465 - DNA, 16 bp, Influenza A
cgctgtggacacttgt

SEQ ID NO: 2466 - DNA, 21 bp, Influenza A
gtcaaacaaaatgggaaatcc

SEQ ID NO: 2467 - DNA, 18 bp, Influenza A
agatgggcaaacttgtga

SEQ ID NO: 2468 - DNA, 20 bp, Influenza A
agcctacggagtatcttagc

SEQ ID NO: 2469 - DNA, 18 bp, Influenza A
ctcatagcagagggctcc

SEQ ID NO: 2470 - DNA, 19 bp, Influenza A
gagttcattgctgaggaat

SEQ ID NO: 2471 - DNA, 20 bp, Influenza A
gcagaatgggatgtctttat

SEQ ID NO: 2472 - DNA, 18 bp, Influenza A
aggagcatgcaaaagagc

SEQ ID NO: 2473 - DNA, 19 bp, Influenza A
gcctacggagtatcttagc

SEQ ID NO: 2474 - DNA, 21 bp, Influenza A
cttgttatccattcgatgtgc

SEQ ID NO: 2475 - DNA, 21 bp, Influenza A
attagtagatggccaaacttg

SEQ ID NO: 2476 - DNA, 21 bp, Influenza A
cggaaaatttgagttcattgc

SEQ ID NO: 2477 - DNA, 19 bp, Influenza A
aatggtgaaaaccctgact

SEQ ID NO: 2478 - DNA, 21 bp, Influenza A
cctctaagattagtagatggc

SEQ ID NO: 2479 - DNA, 19 bp, Influenza A
aagagggcaaatgtgaatg

SEQ ID NO: 2480 - DNA, 20 bp, Influenza A
atgggactatggtaaagacc

SEQ ID NO: 2481 - DNA, 20 bp, Influenza A
gattagtagatggccaaact

SEQ ID NO: 2482 - DNA, 20 bp, Influenza A
acattttcatagagaggccc

SEQ ID NO: 2483 - DNA, 17 bp, Influenza A
atagagcgacccactgc

SEQ ID NO: 2484 - DNA, 15 bp, Influenza A
cgtcactgcccagga

SEQ ID NO: 2485 - DNA, 19 bp, Influenza A
atcctagcaaacaatggga

SEQ ID NO: 2486 - DNA, 21 bp, Influenza A
gaacacagtcaaacaaaatgg

SEQ ID NO: 2487 - DNA, 18 bp, Influenza A
cagggtgtgaccatttga

SEQ ID NO: 2488 - DNA, 19 bp, Influenza A
ggactatggtaaagaccct

SEQ ID NO: 2489 - DNA, 19 bp, Influenza A
atgatcaagtggaagtggt

SEQ ID NO: 2490 - DNA, 19 bp, Influenza A
aacacagtcaagcagaatg

SEQ ID NO: 2491 - DNA, 20 bp, Influenza A
aaacaaaatgggaaatccgg

SEQ ID NO: 2492 - DNA, 20 bp, Influenza A
gctgtaatcacttgaatggt

SEQ ID NO: 2493 - DNA, 16 bp, Influenza A
atagagcgacccaccg

SEQ ID NO: 2494 - DNA, 18 bp, Influenza A
ctacggagcatcttagca

SEQ ID NO: 2495 - DNA, 20 bp, Influenza A
agattagtagatggccaaac

SEQ ID NO: 2496 - DNA, 20 bp, Influenza A
aacacagtcaaacaaaatgg

SEQ ID NO: 2497 - DNA, 21 bp, Influenza A
gcaaatgagaatgactttttc

SEQ ID NO: 2498 - DNA, 20 bp, Influenza A
gaactcttcccaaaactaca

SEQ ID NO: 2499 - DNA, 20 bp, Influenza A
cactgatgatcaagtggaag

SEQ ID NO: 2500 - DNA, 18 bp, Influenza A
aatggaacacggtgaagc

SEQ ID NO: 2501 - DNA, 20 bp, Influenza A
agaattacacagggaatcct

SEQ ID NO: 2502 - DNA, 20 bp, Influenza A
agtttgagttcattgctgag

SEQ ID NO: 2503 - DNA, 16 bp, Influenza A
gagaggcccaatgcag

SEQ ID NO: 2504 - DNA, 16 bp, Influenza A
agagaggcccaatgca

SEQ ID NO: 2505 - DNA, 22 bp, Influenza A
gtcctagccctttaaaattagt

SEQ ID NO: 2506 - DNA, 20 bp, Influenza A
ctctcagaattacacaggga

SEQ ID NO: 2507 - DNA, 19 bp, Influenza A
aaaatggtaaatccggagc

SEQ ID NO: 2508 - DNA, 21 bp, Influenza A
ggtagaatcacaaaatctccc

SEQ ID NO: 2509 - DNA, 19 bp, Influenza A
ccaagtagaagtcgtcact

SEQ ID NO: 2510 - DNA, 21 bp, Influenza A
aatgactttttcaacagactg

SEQ ID NO: 2511 - DNA, 17 bp, Influenza A
ccctcccggaactatgt

SEQ ID NO: 2512 - DNA, 17 bp, Influenza A
gtcactgcacaggaact

SEQ ID NO: 2513 - DNA, 17 bp, Influenza A
ccagggtgtgaccattt

SEQ ID NO: 2514 - DNA, 20 bp, Influenza A
caaaatctcccggaactatg

SEQ ID NO: 2515 - DNA, 19 bp, Influenza A
ggctgtgaccatttgaatg

SEQ ID NO: 2516 - DNA, 17 bp, Influenza A
cctcccggaactatgcc

SEQ ID NO: 2517 - DNA, 19 bp, Influenza A
cctctgagactagttgacg

SEQ ID NO: 2518 - DNA, 21 bp, Influenza A
acagatgaccaaatagaagtt

SEQ ID NO: 2519 - DNA, 16 bp, Influenza A
ggagcattggggagcc

SEQ ID NO: 2520 - DNA, 16 bp, Influenza A
catcatgctgtggcca

SEQ ID NO: 2521 - DNA, 18 bp, Influenza A
agagggcaaatgtggatg

SEQ ID NO: 2522 - DNA, 16 bp, Influenza A
aaatccggagcctgca

SEQ ID NO: 2523 - DNA, 18 bp, Influenza A
atagaagtcgtcactgcc

SEQ ID NO: 2524 - DNA, 17 bp, Influenza A
cggtgaagcaaaatggg

SEQ ID NO: 2525 - DNA, 19 bp, Influenza A
ctacggagtatcctagcaa

SEQ ID NO: 2526 - DNA, 15 bp, Influenza A
agcctgcaagagggc

SEQ ID NO: 2527 - DNA, 15 bp, Influenza A
gggaaatccggggca

SEQ ID NO: 2528 - DNA, 17 bp, Influenza A
actagttgacggccaga

SEQ ID NO: 2529 - DNA, 17 bp, Influenza A
atgggaaatccggagca

SEQ ID NO: 2530 - DNA, 19 bp, Influenza A
cagagctacacaggaaacc

SEQ ID NO: 2531 - DNA, 17 bp, Influenza A
gggaaatccggagcatg

SEQ ID NO: 2532 - DNA, 18 bp, Influenza A
ccagtgcagtagacactt

SEQ ID NO: 2533 - DNA, 18 bp, Influenza A
attgctgaggagttccaa

SEQ ID NO: 2534 - DNA, 17 bp, Influenza A
gccgtatccaatgggac

SEQ ID NO: 2535 - DNA, 15 bp, Influenza A
gggaaatccggggcc

SEQ ID NO: 2536 - DNA, 17 bp, Influenza A
gagggctcctctcagaa

SEQ ID NO: 2537 - DNA, 18 bp, Influenza A
gagggctcctctcaaaat

SEQ ID NO: 2538 - DNA, 21 bp, Influenza A
cgttaagattagtagatgggc

SEQ ID NO: 2539 - DNA, 20 bp, Influenza A
catctcagaactacacaggg

SEQ ID NO: 2540 - DNA, 19 bp, Influenza A
aaatctcccggaattatgc

SEQ ID NO: 2541 - DNA, 17 bp, Influenza A
gaactatgtccgagccc

SEQ ID NO: 2542 - DNA, 18 bp, Influenza A
catcaacggagcattggg

SEQ ID NO: 2543 - DNA, 17 bp, Influenza A
atccggagcatgcaaaa

SEQ ID NO: 2544 - DNA, 17 bp, Influenza A
aaatccggagcatgcaa

SEQ ID NO: 2545 - DNA, 19 bp, Influenza A
ctaccagagttgtgtccta

SEQ ID NO: 2546 - DNA, 20 bp, Influenza A
cctagccctttaagactagt

SEQ ID NO: 2547 - DNA, 22 bp, Influenza A
gccctttaagattaatagatgg

SEQ ID NO: 2548 - DNA, 15 bp, Influenza A
ggggagcccagggtg

SEQ ID NO: 2549 - DNA, 15 bp, Influenza A
gcgacccactgctgt

SEQ ID NO: 2550 - DNA, 15 bp, Influenza A
acggccagacctgtg

SEQ ID NO: 2551 - DNA, 21 bp, Influenza A
gatgatcaggtagaagttgtc

SEQ ID NO: 2552 - DNA, 18 bp, Influenza A
gtcctagcccgttaagat

SEQ ID NO: 2553 - DNA, 16 bp, Influenza A
gctgctctggggagtc

SEQ ID NO: 2554 - DNA, 19 bp, Influenza A
gaaggctcctctcagaatt

SEQ ID NO: 2555 - DNA, 19 bp, Influenza A
ctgtcaaacaaaatgggga

SEQ ID NO: 2556 - DNA, 15 bp, Influenza A
gcgacccaccgctgt

SEQ ID NO: 2557 - DNA, 18 bp, Influenza A
cagagggctcatctcaga

SEQ ID NO: 2558 - DNA, 20 bp, Influenza A
acaacggaaaatttgagttc

SEQ ID NO: 2559 - DNA, 16 bp, Influenza A
ctctggggagtccagg

SEQ ID NO: 2560 - DNA, 16 bp, Influenza A
accggagttgtgtcct

SEQ ID NO: 2561 - DNA, 21 bp, Influenza A
ccctctaagattagtagacgg

SEQ ID NO: 2562 - DNA, 15 bp, Influenza A
cccgggctgtgatca

SEQ ID NO: 2563 - DNA, 17 bp, Influenza A
atgctgtgtccaatggg

SEQ ID NO: 2564 - DNA, 16 bp, Influenza A
cctgaatggtgcggag

SEQ ID NO: 2565 - DNA, 16 bp, Influenza A
atagagcggcccactg

SEQ ID NO: 2566 - DNA, 19 bp, Influenza A
agaggggaaatgtgaatgg

SEQ ID NO: 2567 - DNA, 18 bp, Influenza A
ctgcgatcacctgaatgg

SEQ ID NO: 2568 - DNA, 21 bp, Influenza A
gagtttgagaagcatacttgc

SEQ ID NO: 2569 - DNA, 20 bp, Influenza A
agtttgagaagcatacttgc

SEQ ID NO: 2570 - DNA, 20 bp, Influenza A
actgtgaagcaaaatggtaa

SEQ ID NO: 2571 - DNA, 19 bp, Influenza A
gagcctaaggagcatactt

SEQ ID NO: 2572 - DNA, 17 bp, Influenza A
gcttgttgcagagagct

SEQ ID NO: 2573 - DNA, 17 bp, Influenza A
aactatgcccgagtcct

SEQ ID NO: 2574 - DNA, 20 bp, Influenza A
gtacccaacaataaagagga

SEQ ID NO: 2575 - DNA, 19 bp, Influenza A
cccaacaataaagaggagc

SEQ ID NO: 2576 - DNA, 21 bp, Influenza A
ccaacaataaagaggacctac

SEQ ID NO: 2577 - DNA, 20 bp, Influenza A
attgtagtgtagctggatgg

SEQ ID NO: 2578 - DNA, 22 bp, Influenza A
gagttcttctggacaattttaa

SEQ ID NO: 2579 - DNA, 19 bp, Influenza A
ccaatgtgtgacgaattca

SEQ ID NO: 2580 - DNA, 19 bp, Influenza A
ggattgtagtgtagctgga

SEQ ID NO: 2581 - DNA, 19 bp, Influenza A
cccaatgtgtgacgaattc

SEQ ID NO: 2582 - DNA, 25 bp, Influenza A
ccattttgaaaaaattcagatattt

SEQ ID NO: 2583 - DNA, 20 bp, Influenza A
gcacaaaccattttgagaaa

SEQ ID NO: 2584 - DNA, 23 bp, Influenza A
attttgagagattgtagtgtagc

SEQ ID NO: 2585 - DNA, 22 bp, Influenza A
agagagaagaagaaaaaagaga

SEQ ID NO: 2586 - DNA, 23 bp, Influenza A
cacaaaccatttagagaaaattc

SEQ ID NO: 2587 - DNA, 19 bp, Influenza A
cctttttcaggaatgtggt

SEQ ID NO: 2588 - DNA, 21 bp, Influenza A
gaaatgtggtatggcttatca

SEQ ID NO: 2589 - DNA, 21 bp, Influenza A
acaataaagaggacctacaat

SEQ ID NO: 2590 - DNA, 20 bp, Influenza A
aggttgacacaataatggaa

SEQ ID NO: 2591 - DNA, 23 bp, Influenza A
ctaattttgagagattgtagtgt

SEQ ID NO: 2592 - DNA, 21 bp, Influenza A
acacaatcatggaaaagaatg

SEQ ID NO: 2593 - DNA, 22 bp, Influenza A
ctattgagcagaataaaccatt

SEQ ID NO: 2594 - DNA, 20 bp, Influenza A
atccaacaataaagaggacc

SEQ ID NO: 2595 - DNA, 21 bp, Influenza A
aaaccattttgagaaaactca

SEQ ID NO: 2596 - DNA, 20 bp, Influenza A
aggttgacacaataatggag

SEQ ID NO: 2597 - DNA, 20 bp, Influenza A
ccaaccaagaagatcttttg

SEQ ID NO: 2598 - DNA, 20 bp, Influenza A
ctcctttttcagaaatgtgg

SEQ ID NO: 2599 - DNA, 21 bp, Influenza A
acttcgagagtaatggaaatt

SEQ ID NO: 2600 - DNA, 22 bp, Influenza A
caaacaataaagaggacctaca

SEQ ID NO: 2601 - DNA, 21 bp, Influenza A
gaacaataaagaggacctaca

SEQ ID NO: 2602 - DNA, 21 bp, Influenza A
aaacaataaagaggacctaca

SEQ ID NO: 2603 - DNA, 18 bp, Influenza A
gtagctggatggcttctt

SEQ ID NO: 2604 - DNA, 22 bp, Influenza A
caacaataaagaggacttacaa

SEQ ID NO: 2605 - DNA, 21 bp, Influenza A
gcagaataaaccattttgaga

SEQ ID NO: 2606 - DNA, 21 bp, Influenza A
gagcagaataaaccattttga

SEQ ID NO: 2607 - DNA, 20 bp, Influenza A
agaaaattcagatcatcccc

SEQ ID NO: 2608 - DNA, 19 bp, Influenza A
agcacaaaccattttgaga

SEQ ID NO: 2609 - DNA, 21 bp, Influenza A
aagaactgaaacacctattga

SEQ ID NO: 2610 - DNA, 21 bp, Influenza A
cctattgagcagaataaacca

SEQ ID NO: 2611 - DNA, 21 bp, Influenza A
cacctattgagcagaataaac

SEQ ID NO: 2612 - DNA, 23 bp, Influenza A
acaaacctttttgagaaaattag

SEQ ID NO: 2613 - DNA, 20 bp, Influenza A
cacatgctcaagacatactg

SEQ ID NO: 2614 - DNA, 18 bp, Influenza A
attgcagtgtagctggat

SEQ ID NO: 2615 - DNA, 20 bp, Influenza A
gaaaattcagatcatcccca

SEQ ID NO: 2616 - DNA, 20 bp, Influenza A
atgtgtgacgaattcatcaa

SEQ ID NO: 2617 - DNA, 21 bp, Influenza A
agaactgaaacacctattgag

SEQ ID NO: 2618 - DNA, 21 bp, Influenza A
gaactgaaacacctattgagc

SEQ ID NO: 2619 - DNA, 20 bp, Influenza A
gagcagaacaaaccattttg

SEQ ID NO: 2620 - DNA, 20 bp, Influenza A
aaacacctattgagcagaat

SEQ ID NO: 2621 - DNA, 19 bp, Influenza A
cagaaatgtggtatggctt

SEQ ID NO: 2622 - DNA, 21 bp, Influenza A
aacttcgagagtaatggaaat

SEQ ID NO: 2623 - DNA, 21 bp, Influenza A
ctatgtgtgacgaattcatca

SEQ ID NO: 2624 - DNA, 20 bp, Influenza A
ccctcctttttcagaaatgt

SEQ ID NO: 2625 - DNA, 21 bp, Influenza A
cagtacaaaccattttgagaa

SEQ ID NO: 2626 - DNA, 18 bp, Influenza A
gctcagcatgtccataca

SEQ ID NO: 2627 - DNA, 21 bp, Influenza A
acagtacatacccaacaataa

SEQ ID NO: 2628 - DNA, 18 bp, Influenza A
agagcaggttgacacaat

SEQ ID NO: 2629 - DNA, 20 bp, Influenza A
aattcagatcatccccaaaa

SEQ ID NO: 2630 - DNA, 20 bp, Influenza A
attcagatcatccccaaaag

SEQ ID NO: 2631 - DNA, 21 bp, Influenza A
caagaactgaaacacctattg

SEQ ID NO: 2632 - DNA, 20 bp, Influenza A
atcatccccaaaagttcttg

SEQ ID NO: 2633 - DNA, 24 bp, Influenza A
aacaataaagaagacctacaataa

SEQ ID NO: 2634 - DNA, 19 bp, Influenza A
cacacatgctcaagacata

SEQ ID NO: 2635 - DNA, 21 bp, Influenza A
ctcaagacatactggaaaaag

SEQ ID NO: 2636 - DNA, 19 bp, Influenza A
gattgtagtgtagctgggt

SEQ ID NO: 2637 - DNA, 20 bp, Influenza A
cagatcatccccaaaagttc

SEQ ID NO: 2638 - DNA, 19 bp, Influenza A
ctgaaacacctattgagca

SEQ ID NO: 2639 - DNA, 22 bp, Influenza A
aataatggaaaagaacgttact

SEQ ID NO: 2640 - DNA, 20 bp, Influenza A
aaacacctattgagcagaac

SEQ ID NO: 2641 - DNA, 22 bp, Influenza A
ataatggaaaagaacgttactg

SEQ ID NO: 2642 - DNA, 20 bp, Influenza A
caatgtgtgacgaattcatc

SEQ ID NO: 2643 - DNA, 20 bp, Influenza A
ctgagagattgtagtgtagc

SEQ ID NO: 2644 - DNA, 19 bp, Influenza A
gtccaatcatgaagcctca

SEQ ID NO: 2645 - DNA, 19 bp, Influenza A
actgaaacacctattgagc

SEQ ID NO: 2646 - DNA, 20 bp, Influenza A
agcaggttgacacaataatg

SEQ ID NO: 2647 - DNA, 20 bp, Influenza A
attcagatcatccccaaaaa

SEQ ID NO: 2648 - DNA, 19 bp, Influenza A
ccaatcatgaagcctcatc

SEQ ID NO: 2649 - DNA, 18 bp, Influenza A
atcaatgtgccggaatgg

SEQ ID NO: 2650 - DNA, 22 bp, Influenza A
acttattgagcagaataaacca

SEQ ID NO: 2651 - DNA, 21 bp, Influenza A
cacaataatggaaaagaacgt

SEQ ID NO: 2652 - DNA, 23 bp, Influenza A
aaacatctattgagcagaataaa

SEQ ID NO: 2653 - DNA, 19 bp, Influenza A
attgtagtgtagctgggtg

SEQ ID NO: 2654 - DNA, 21 bp, Influenza A
acaataatggaaaagaacgtt

SEQ ID NO: 2655 - DNA, 19 bp, Influenza A
atcatgaagcctcatcagg

SEQ ID NO: 2656 - DNA, 20 bp, Influenza A
cagaaatacccctcaaagag

SEQ ID NO: 2657 - DNA, 19 bp, Influenza A
gacgaattcatcaatgtgc

SEQ ID NO: 2658 - DNA, 19 bp, Influenza A
acgaattcatcaatgtgcc

SEQ ID NO: 2659 - DNA, 21 bp, Influenza A
aattgaaacacctattgagca

SEQ ID NO: 2660 - DNA, 20 bp, Influenza A
cctatgtgtgacgaattcat

SEQ ID NO: 2661 - DNA, 19 bp, Influenza A
aatgacctctgttacccag

SEQ ID NO: 2662 - DNA, 21 bp, Influenza A
gatcagatttgcattggttac

SEQ ID NO: 2663 - DNA, 20 bp, Influenza A
caaaaagaacagtgcatacc

SEQ ID NO: 2664 - DNA, 19 bp, Influenza A
catgcccaagacatactgg

SEQ ID NO: 2665 - DNA, 20 bp, Influenza A
cccaagacatactggaaaag

SEQ ID NO: 2666 - DNA, 21 bp, Influenza A
agtgaagcctctaattttgag

SEQ ID NO: 2667 - DNA, 21 bp, Influenza A
gagaaaattcaaatcatcccc

SEQ ID NO: 2668 - DNA, 21 bp, Influenza A
agaaaattcaaatcatcccca

SEQ ID NO: 2669 - DNA, 20 bp, Influenza A
ccaagacatactggaaaaga

SEQ ID NO: 2670 - DNA, 22 bp, Influenza A
cttatcaaaaagaacaatgcat

SEQ ID NO: 2671 - DNA, 18 bp, Influenza A
ggtccaatcatgaagcct

SEQ ID NO: 2672 - DNA, 20 bp, Influenza A
ggagtgaagcctctaatttt

SEQ ID NO: 2673 - DNA, 19 bp, Influenza A
agccaatgacctctgttac

SEQ ID NO: 2674 - DNA, 19 bp, Influenza A
ccagatcatccccaaaagt

SEQ ID NO: 2675 - DNA, 21 bp, Influenza A
aaagtgatcagatttgcattg

SEQ ID NO: 2676 - DNA, 21 bp, Influenza A
aaaagtgatcagatttgcatt

SEQ ID NO: 2677 - DNA, 21 bp, Influenza A
gcttatcaaaaagaacaatgc

SEQ ID NO: 2678 - DNA, 25 bp, Influenza A
ctaattttaagagattgtagtgtag

SEQ ID NO: 2679 - DNA, 19 bp, Influenza A
aacttctggttctcatgga

SEQ ID NO: 2680 - DNA, 16 bp, Influenza A
gcgtagctggatggct

SEQ ID NO: 2681 - DNA, 21 bp, Influenza A
agaacgttactgttacacatg

SEQ ID NO: 2682 - DNA, 22 bp, Influenza A
aaaattcagatcatacccaaaa

SEQ ID NO: 2683 - DNA, 20 bp, Influenza A
aatgtcaagaacctttacga

SEQ ID NO: 2684 - DNA, 19 bp, Influenza A
ccctatgtgtgacgaattc

SEQ ID NO: 2685 - DNA, 21 bp, Influenza A
aaaagaacgttactgttacac

SEQ ID NO: 2686 - DNA, 18 bp, Influenza A
aaagacacacaacgggaa

SEQ ID NO: 2687 - DNA, 20 bp, Influenza A
agtcaatgacctctgttacc

SEQ ID NO: 2688 - DNA, 19 bp, Influenza A
atggagtgaagcctctaat

SEQ ID NO: 2689 - DNA, 19 bp, Influenza A
actggaaaagacacacaac

SEQ ID NO: 2690 - DNA, 23 bp, Influenza A
aaagtcctccttttttagaaatg

SEQ ID NO: 2691 - DNA, 19 bp, Influenza A
agagattgtagtgtagccg

SEQ ID NO: 2692 - DNA, 20 bp, Influenza A
gtgatcagatttgcattggt

SEQ ID NO: 2693 - DNA, 20 bp, Influenza A
ccagatttgcattggttacc

SEQ ID NO: 2694 - DNA, 19 bp, Influenza A
agccaatgacctctgttat

SEQ ID NO: 2695 - DNA, 18 bp, Influenza A
aaaagacacacaacggga

SEQ ID NO: 2696 - DNA, 20 bp, Influenza A
ctatgtgtgacgaattcacc

SEQ ID NO: 2697 - DNA, 21 bp, Influenza A
gaaaattcaaatcatccccag

SEQ ID NO: 2698 - DNA, 19 bp, Influenza A
atgtggtatggcttatcca

SEQ ID NO: 2699 - DNA, 20 bp, Influenza A
gagtgaagcctctcattttg

SEQ ID NO: 2700 - DNA, 20 bp, Influenza A
aagacatactggaaaagacc

SEQ ID NO: 2701 - DNA, 19 bp, Influenza A
acccaacaatcaagaggag

SEQ ID NO: 2702 - DNA, 17 bp, Influenza A
aatgtgccggaatggtc

SEQ ID NO: 2703 - DNA, 16 bp, Influenza A
agggaggatggcaggg

SEQ ID NO: 2704 - DNA, 21 bp, Influenza A
cagatcatccccaaaaattct

SEQ ID NO: 2705 - DNA, 18 bp, Influenza A
ctcaatgtgccggaatgg

SEQ ID NO: 2706 - DNA, 17 bp, Influenza A
caatgtgccggaatggt

SEQ ID NO: 2707 - DNA, 20 bp, Influenza A
gatctaaatggagtgaagcc

SEQ ID NO: 2708 - DNA, 18 bp, Influenza A
aagctcagcatgtccata

SEQ ID NO: 2709 - DNA, 19 bp, Influenza A
gagggattgtagtgtagct

SEQ ID NO: 2710 - DNA, 20 bp, Influenza A
aaacacctattgagcagtac

SEQ ID NO: 2711 - DNA, 23 bp, Influenza A
agtaatgaatacccaacaataaa

SEQ ID NO: 2712 - DNA, 20 bp, Influenza A
gaacgttactgttacacatg

SEQ ID NO: 2713 - DNA, 20 bp, Influenza A
accagatttgcattggttac

SEQ ID NO: 2714 - DNA, 19 bp, Influenza A
gactgggctcagaaatacc

SEQ ID NO: 2715 - DNA, 21 bp, Influenza A
cctccttttttagaaatgtgg

SEQ ID NO: 2716 - DNA, 21 bp, Influenza A
aacagtacatacccaacaatc

SEQ ID NO: 2717 - DNA, 18 bp, Influenza A
ggaaaagacacacaacgg

SEQ ID NO: 2718 - DNA, 19 bp, Influenza A
aaaagttcttggtccagtc

SEQ ID NO: 2719 - DNA, 20 bp, Influenza A
gcgatctaaatggagtgaag

SEQ ID NO: 2720 - DNA, 20 bp, Influenza A
gcctgaatggtcttacatag

SEQ ID NO: 2721 - DNA, 18 bp, Influenza A
atggagtgaagcctctca

SEQ ID NO: 2722 - DNA, 22 bp, Influenza A
atcagtcttgttaaaagtgatc

SEQ ID NO: 2723 - DNA, 18 bp, Influenza A
ggaagctctgcgatctag

SEQ ID NO: 2724 - DNA, 20 bp, Influenza A
aatgacctctgttatccagg

SEQ ID NO: 2725 - DNA, 16 bp, Influenza A
ggatggctcctcggaa

SEQ ID NO: 2726 - DNA, 19 bp, Influenza A
acacctattgagcagaaca

SEQ ID NO: 2727 - DNA, 21 bp, Influenza A
cagaataagccattttgagaa

SEQ ID NO: 2728 - DNA, 18 bp, Influenza A
catgaagcctcatcaggg

SEQ ID NO: 2729 - DNA, 18 bp, Influenza A
atgaagcctcatcagggg

SEQ ID NO: 2730 - DNA, 18 bp, Influenza A
ccatgtgtgacgaattcc

SEQ ID NO: 2731 - DNA, 20 bp, Influenza A
gaaaattcagatcttcccca

SEQ ID NO: 2732 - DNA, 21 bp, Influenza A
ctaaaagtgatcagatttgca

SEQ ID NO: 2733 - DNA, 18 bp, Influenza A
aggaatgtggtatggctt

SEQ ID NO: 2734 - DNA, 19 bp, Influenza A
aaagttcttggtccagtca

SEQ ID NO: 2735 - DNA, 21 bp, Influenza A
attgagcacaataaaccattt

SEQ ID NO: 2736 - DNA, 21 bp, Influenza A
aaagctctatcaaaatccaac

SEQ ID NO: 2737 - DNA, 19 bp, Influenza A
aaatgtggtatggctcatc

SEQ ID NO: 2738 - DNA, 21 bp, Influenza A
gacgaattcatcaatgtaccg

SEQ ID NO: 2739 - DNA, 24 bp, Influenza A
ctaattttgaaagattgtagtgta

SEQ ID NO: 2740 - DNA, 21 bp, Influenza A
agcaggttgatacaataatgg

SEQ ID NO: 2741 - DNA, 18 bp, Influenza A
acaaggtccgactacagc

SEQ ID NO: 2742 - DNA, 20 bp, Influenza A
aaaattcagatgatccccaa

SEQ ID NO: 2743 - DNA, 20 bp, Influenza A
gagaaaactcagatcatccc

SEQ ID NO: 2744 - DNA, 21 bp, Influenza A
gataatccccaaaagttcttg

SEQ ID NO: 2745 - DNA, 20 bp, Influenza A
atgtgtgacgaattccttaa

SEQ ID NO: 2746 - DNA, 21 bp, Influenza A
aaaaagaacagttcataccca

SEQ ID NO: 2747 - DNA, 19 bp, Influenza A
agttcagcatgtccatacc

SEQ ID NO: 2748 - DNA, 20 bp, Influenza A
agatcttttggtaatgtggg

SEQ ID NO: 2749 - DNA, 20 bp, Influenza A
aagttcctcctttttcagaa

SEQ ID NO: 2750 - DNA, 21 bp, Influenza A
gcaaattgacacaataatgga

SEQ ID NO: 2751 - DNA, 20 bp, Influenza A
gagcagaataaaccactttg

SEQ ID NO: 2752 - DNA, 19 bp, Influenza A
atgacctctgttatccagg

SEQ ID NO: 2753 - DNA, 19 bp, Influenza A
cctaaatggagtgaagcct

SEQ ID NO: 2754 - DNA, 19 bp, Influenza A
catgcccaagacatacttg

SEQ ID NO: 2755 - DNA, 19 bp, Influenza A
attcttggtccagtcatga

SEQ ID NO: 2756 - DNA, 19 bp, Influenza A
gtaatgtgggggattcacc

SEQ ID NO: 2757 - DNA, 19 bp, Influenza A
ccaagacatactggaaagg

SEQ ID NO: 2758 - DNA, 17 bp, Influenza A
gacacacaacgggaagc

SEQ ID NO: 2759 - DNA, 20 bp, Influenza A
gcgatctaaatggagtgaaa

SEQ ID NO: 2760 - DNA, 24 bp, Influenza A
aatagttagtcttgttaaaagtga

SEQ ID NO: 2761 - DNA, 17 bp, Influenza A
acacatgcccaagacat

SEQ ID NO: 2762 - DNA, 17 bp, Influenza A
acaacgggaagctctgc

SEQ ID NO: 2763 - DNA, 21 bp, Influenza A
caatgtgtgacaaattcatca

SEQ ID NO: 2764 - DNA, 19 bp, Influenza A
catgcccaagacatactcg

SEQ ID NO: 2765 - DNA, 16 bp, Influenza A
ctgtgccggaatggtc

SEQ ID NO: 2766 - DNA, 20 bp, Influenza A
gagctcagtatgtccatacc

SEQ ID NO: 2767 - DNA, 17 bp, Influenza A
acagagcaggttgacac

SEQ ID NO: 2768 - DNA, 18 bp, Influenza A
aatccagccaatgacctc

SEQ ID NO: 2769 - DNA, 19 bp, Influenza A
gtgacgaattcctcaatgt

SEQ ID NO: 2770 - DNA, 20 bp, Influenza A
ctaatgacctctgttaccca

SEQ ID NO: 2771 - DNA, 16 bp, Influenza A
gctcctcggaaaccca

SEQ ID NO: 2772 - DNA, 18 bp, Influenza A
agcatgtccataccaggg

SEQ ID NO: 2773 - DNA, 19 bp, Influenza A
caaattcatcaatgtgccg

SEQ ID NO: 2774 - DNA, 19 bp, Influenza A
gatcatccccaaaagctct

SEQ ID NO: 2775 - DNA, 22 bp, Influenza A
gcaatagtcagtcttgttaaaa

SEQ ID NO: 2776 - DNA, 18 bp, Influenza A
cagcatgtccatacctgg

SEQ ID NO: 2777 - DNA, 17 bp, Influenza A
gcagcatgtccatacca

SEQ ID NO: 2778 - DNA, 18 bp, Influenza A
ccagtcaatgacctctgt

SEQ ID NO: 2779 - DNA, 20 bp, Influenza A
atcttccccaaaagttcttg

SEQ ID NO: 2780 - DNA, 22 bp, Influenza A
aagcaaattgacacaataatgg

SEQ ID NO: 2781 - DNA, 21 bp, Influenza A
gaactggttgacacaataatg

SEQ ID NO: 2782 - DNA, 19 bp, Influenza A
ctctgcgatctaaatggag

SEQ ID NO: 2783 - DNA, 18 bp, Influenza A
acacctattgagcagcac

SEQ ID NO: 2784 - DNA, 19 bp, Influenza A
gaaacacctagtgagcagc

SEQ ID NO: 2785 - DNA, 17 bp, Influenza A
agtggagaaggccagtc

SEQ ID NO: 2786 - DNA, 19 bp, Influenza A
acctatatttccgttggga

SEQ ID NO: 2787 - DNA, 20 bp, Influenza A
agaacagttcatacccaaca

SEQ ID NO: 2788 - DNA, 16 bp, Influenza A
acacacaacgggaagc

SEQ ID NO: 2789 - DNA, 18 bp, Influenza A
gacctctgttatccaggg

SEQ ID NO: 2790 - DNA, 21 bp, Influenza A
aaattcttggtccaatcatga

SEQ ID NO: 2791 - DNA, 17 bp, Influenza A
cacacatgcccaagaca

SEQ ID NO: 2792 - DNA, 19 bp, Influenza A
cttacataggggagaaggc

SEQ ID NO: 2793 - DNA, 24 bp, Influenza A
aatcaataggaatttaccaaatac

SEQ ID NO: 2794 - DNA, 20 bp, Influenza A
acctattgagcggaataaac

SEQ ID NO: 2795 - DNA, 20 bp, Influenza A
aatcatgaagcctcatcagg

SEQ ID NO: 2796 - DNA, 19 bp, Influenza A
gaagccctcctttttcaga

SEQ ID NO: 2797 - DNA, 20 bp, Influenza A
ggcttatccaaaagaacagt

SEQ ID NO: 2798 - DNA, 20 bp, Influenza A
aattcatcaatgtgccagaa

SEQ ID NO: 2799 - DNA, 19 bp, Influenza A
aaaagttcttggtccgatc

SEQ ID NO: 2800 - DNA, 19 bp, Influenza A
aaagttcttggtccgatca

SEQ ID NO: 2801 - DNA, 19 bp, Influenza A
agctctgcgatctaaatgg

SEQ ID NO: 2802 - DNA, 18 bp, Influenza A
gagctcttggtccaatca

SEQ ID NO: 2803 - DNA, 18 bp, Influenza A
aagccctcctttttcaga

SEQ ID NO: 2804 - DNA, 18 bp, Influenza A
aagctcttggtccaatca

SEQ ID NO: 2805 - DNA, 21 bp, Influenza A
ggagaaaatagtgcttcttct

SEQ ID NO: 2806 - DNA, 16 bp, Influenza A
agctcagcatgtccgt

SEQ ID NO: 2807 - DNA, 17 bp, Influenza A
gctcagcatgtccacac

SEQ ID NO: 2808 - DNA, 17 bp, Influenza A
aactcgacagagcaggt

SEQ ID NO: 2809 - DNA, 20 bp, Influenza A
gggtgaagcctctaattttg

SEQ ID NO: 2810 - DNA, 17 bp, Influenza A
ctcgacagagcaggttg

SEQ ID NO: 2811 - DNA, 20 bp, Influenza A
cagagcaggttgatacaatc

SEQ ID NO: 2812 - DNA, 17 bp, Influenza A
actcgacagagcaggtt

SEQ ID NO: 2813 - DNA, 16 bp, Influenza A
aacgggaagctctgca

SEQ ID NO: 2814 - DNA, 22 bp, Influenza A
gagtgaaacctctaattttgaa

SEQ ID NO: 2815 - DNA, 17 bp, Influenza A
ataacgggaagctctgc

SEQ ID NO: 2816 - DNA, 19 bp, Influenza A
agacatactggaaaggaca

SEQ ID NO: 2817 - DNA, 20 bp, Influenza A
catgcaaataactcgacaga

SEQ ID NO: 2818 - DNA, 17 bp, Influenza A
caactcgacagagcagg

SEQ ID NO: 2819 - DNA, 17 bp, Influenza A
acaactcgacagagcag

SEQ ID NO: 2820 - DNA, 19 bp, Influenza A
atgacctctgttaccctgg

SEQ ID NO: 2821 - DNA, 15 bp, Influenza A
cgggaagctctgcga

SEQ ID NO: 2822 - DNA, 19 bp, Influenza A
gacagagcaggttgataca

SEQ ID NO: 2823 - DNA, 18 bp, Influenza A
gaaaggacacacaacggg

SEQ ID NO: 2824 - DNA, 17 bp, Influenza A
ccaggggatttcaacga

SEQ ID NO: 2825 - DNA, 19 bp, Influenza A
cagatttgcatcggttacc

SEQ ID NO: 2826 - DNA, 19 bp, Influenza A
agggaaagtcctccttttt

SEQ ID NO: 2827 - DNA, 22 bp, Influenza A
aagacatattggaaaagacaca

SEQ ID NO: 2828 - DNA, 18 bp, Influenza A
agcatgtccatacctgag

SEQ ID NO: 2829 - DNA, 18 bp, Influenza A
agcaggtcgacacaataa

SEQ ID NO: 2830 - DNA, 20 bp, Influenza A
actggaaaagacacacaatg

SEQ ID NO: 2831 - DNA, 22 bp, Influenza A
aataatggagaagaacgttact

SEQ ID NO: 2832 - DNA, 19 bp, Influenza A
gaaaagacacacaatggga

SEQ ID NO: 2833 - DNA, 19 bp, Influenza A
cagaagttcttggtccagt

SEQ ID NO: 2834 - DNA, 19 bp, Influenza A
ggaaaagacacacaatggg

SEQ ID NO: 2835 - DNA, 22 bp, Influenza A
gaaagtcctccttttttagaaa

SEQ ID NO: 2836 - DNA, 18 bp, Influenza A
gctcagcatgttcatacc

SEQ ID NO: 2837 - DNA, 17 bp, Influenza A
agtgcaggttgacacaa

SEQ ID NO: 2838 - DNA, 20 bp, Influenza A
cttcttgcaatagtcagtct

SEQ ID NO: 2839 - DNA, 19 bp, Influenza A
agagattgtagcgtagctg

SEQ ID NO: 2840 - DNA, 19 bp, Influenza A
gagattgtagtgtcgctgg

SEQ ID NO: 2841 - DNA, 20 bp, Influenza A
ctggaaaagacacacaatgg

SEQ ID NO: 2842 - DNA, 18 bp, Influenza A
ccagtcatgaagcctcat

SEQ ID NO: 2843 - DNA, 18 bp, Influenza A
cgaattcaccaatgtgcc

SEQ ID NO: 2844 - DNA, 19 bp, Influenza A
cgatcatgaagcctcatca

SEQ ID NO: 2845 - DNA, 22 bp, Influenza A
aagacatacttgaaaagacaca

SEQ ID NO: 2846 - DNA, 18 bp, Influenza A
ctcgacagaacaggttga

SEQ ID NO: 2847 - DNA, 18 bp, Influenza A
cgaattcatcaacgtgcc

SEQ ID NO: 2848 - DNA, 21 bp, Influenza A
cagtcttgtcaaaagtgatca

SEQ ID NO: 2849 - DNA, 18 bp, Influenza A
ccaggggatttcaacaac

SEQ ID NO: 2850 - DNA, 20 bp, Influenza A
atcagatttgcactggttac

SEQ ID NO: 2851 - DNA, 18 bp, Influenza A
aattcatcactgtgccgg

SEQ ID NO: 2852 - DNA, 21 bp, Influenza A
gaactgaaacacctattaagc

SEQ ID NO: 2853 - DNA, 22 bp, Influenza A
gagaatttaaacaggaagatgg

SEQ ID NO: 2854 - DNA, 18 bp, Influenza A
atgcctcatcaggagtga

SEQ ID NO: 2855 - DNA, 19 bp, Influenza A
ctaggagttcttggtccaa

SEQ ID NO: 2856 - DNA, 19 bp, Influenza A
cttggtccagtcatgaagc

SEQ ID NO: 2857 - DNA, 18 bp, Influenza A
cgtcactgttacacatgc

SEQ ID NO: 2858 - DNA, 18 bp, Influenza A
actcgacagaacaggttg

SEQ ID NO: 2859 - DNA, 21 bp, Influenza A
agacatacttgaaaagacaca

SEQ ID NO: 2860 - DNA, 18 bp, Influenza A
gtccagtcaatgacctct

SEQ ID NO: 2861 - DNA, 23 bp, Influenza A
agtgaagcatctaattttaagag

SEQ ID NO: 2862 - DNA, 20 bp, Influenza A
ataatgctgaacttcctggt

SEQ ID NO: 2863 - DNA, 19 bp, Influenza A
gatcaggtttgcattggtt

SEQ ID NO: 2864 - DNA, 17 bp, Influenza A
cagccaatgacctctgt

SEQ ID NO: 2865 - DNA, 20 bp, Influenza A
gaactgaaacacctactgag

SEQ ID NO: 2866 - DNA, 18 bp, Influenza A
cccaagacatcctggaaa

SEQ ID NO: 2867 - DNA, 18 bp, Influenza A
gtccagtcatgaagcctc

SEQ ID NO: 2868 - DNA, 17 bp, Influenza A
agtccagccaatgacct

SEQ ID NO: 2869 - DNA, 24 bp, Influenza A
gaagaactgaaacatctattaagc

SEQ ID NO: 2870 - DNA, 17 bp, Influenza A
cagtccagccaatgacc

SEQ ID NO: 2871 - DNA, 18 bp, Influenza A
ccagtccagtcaatgacc

SEQ ID NO: 2872 - DNA, 19 bp, Influenza A
gaaaaaacacacaacggga

SEQ ID NO: 2873 - DNA, 20 bp, Influenza A
cattttgagagattgcagtg

SEQ ID NO: 2874 - DNA, 21 bp, Influenza A
acaatcatggaaaagaatgtg

SEQ ID NO: 2875 - DNA, 20 bp, Influenza A
cagaagttcttggtccaatc

SEQ ID NO: 2876 - DNA, 20 bp, Influenza A
gaaaagaacgtcactgttac

SEQ ID NO: 2877 - DNA, 20 bp, Influenza A
ggagagaatagtgcttcttc

SEQ ID NO: 2878 - DNA, 18 bp, Influenza A
actgggctcagaaatagc

SEQ ID NO: 2879 - DNA, 17 bp, Influenza A
catcaggggtgagctcc

SEQ ID NO: 2880 - DNA, 16 bp, Influenza A
agcctcatcaggggtg

SEQ ID NO: 2881 - DNA, 20 bp, Influenza A
caacgactatcaagaactga

SEQ ID NO: 2882 - DNA, 19 bp, Influenza A
caactgggctcagaaatag

SEQ ID NO: 2883 - DNA, 21 bp, Influenza A
gtcaaccttgttaaaagtgat

SEQ ID NO: 2884 - DNA, 21 bp, Influenza A
acgaagaactgaaacatctat

SEQ ID NO: 2885 - DNA, 22 bp, Influenza A
atcaaaaagaacaatgcatacc

SEQ ID NO: 2886 - DNA, 19 bp, Influenza A
atgcaatcaacttcgagag

SEQ ID NO: 2887 - DNA, 18 bp, Influenza A
caaccatgatgcctcatc

SEQ ID NO: 2888 - DNA, 19 bp, Influenza A
aaaccgaatgatgcaatca

SEQ ID NO: 2889 - DNA, 20 bp, Influenza A
gctgaaacacctattaagca

SEQ ID NO: 2890 - DNA, 18 bp, Influenza A
ggaagctcagcgatctag

SEQ ID NO: 2891 - DNA, 16 bp, Influenza A
gagcctcatcaggggt

SEQ ID NO: 2892 - DNA, 21 bp, Influenza A
cctttttcaggaatgtagtgt

SEQ ID NO: 2893 - DNA, 18 bp, Influenza A
catgtccataccagggaa

SEQ ID NO: 2894 - DNA, 21 bp, Influenza A
acacaatcatggagaagaatg

SEQ ID NO: 2895 - DNA, 20 bp, Influenza A
gtcagtcttgttaaaggtga

SEQ ID NO: 2896 - DNA, 18 bp, Influenza A
cctcatcaggggtaagct

SEQ ID NO: 2897 - DNA, 20 bp, Influenza A
gtcagtcttgttaagagtga

SEQ ID NO: 2898 - DNA, 18 bp, Influenza A
ggccaatccagtcaatga

SEQ ID NO: 2899 - DNA, 18 bp, Influenza A
cctcatcaggggttagct

SEQ ID NO: 2900 - DNA, 19 bp, Influenza A
aatccagtcaatgacctct

SEQ ID NO: 2901 - DNA, 21 bp, Influenza A
gacaattttgaaaccgaatga

SEQ ID NO: 2902 - DNA, 19 bp, Influenza A
cataccagggaaagtcctc

SEQ ID NO: 2903 - DNA, 18 bp, Influenza A
cagtgcttcttcttgcaa

SEQ ID NO: 2904 - DNA, 20 bp, Influenza A
ctttttcaggaatgtggtgt

SEQ ID NO: 2905 - DNA, 20 bp, Influenza A
atagtggagaaggacaatcc

SEQ ID NO: 2906 - DNA, 18 bp, Influenza A
accatgaagcctcatcag

SEQ ID NO: 2907 - DNA, 21 bp, Influenza A
atttaatgagcagcacaaatc

SEQ ID NO: 2908 - DNA, 20 bp, Influenza A
caatgtgtgatgaattcctg

SEQ ID NO: 2909 - DNA, 18 bp, Influenza A
gtccataccagggaaagt

SEQ ID NO: 2910 - DNA, 21 bp, Influenza A
cttcttttttcaggaatgtgg

SEQ ID NO: 2911 - DNA, 20 bp, Influenza A
atttaatgagcagcacaaac

SEQ ID NO: 2912 - DNA, 18 bp, Influenza A
ccataccagggaaagtcc

SEQ ID NO: 2913 - DNA, 18 bp, Influenza A
acaatccagtcaatggcc

SEQ ID NO: 2914 - DNA, 19 bp, Influenza A
cgacacaatcatggagaag

SEQ ID NO: 2915 - DNA, 18 bp, Influenza A
cataccaggggaagtcct

SEQ ID NO: 2916 - DNA, 19 bp, Influenza A
cattctgaaggattgcagt

SEQ ID NO: 2917 - DNA, 20 bp, Influenza A
ggggatttcaacaactatga

SEQ ID NO: 2918 - DNA, 19 bp, Influenza A
cctcattctgaaggattgc

SEQ ID NO: 2919 - DNA, 17 bp, Influenza A
gagaaggccagtccagc

SEQ ID NO: 2920 - DNA, 17 bp, Influenza A
gagaaggccaatccagc

SEQ ID NO: 2921 - DNA, 22 bp, Influenza A
atttttctggacaatactaagg

SEQ ID NO: 2922 - DNA, 20 bp, Influenza A
ctcaggacatactggaaaaa

SEQ ID NO: 2923 - DNA, 20 bp, Influenza A
agtcatgaagcctcattagg

SEQ ID NO: 2924 - DNA, 20 bp, Influenza A
cagtcatgaagcctcattag

SEQ ID NO: 2925 - DNA, 20 bp, Influenza A
atgtgtgatgaattcctgaa

SEQ ID NO: 2926 - DNA, 17 bp, Influenza A
cggtcacacatgctcag

SEQ ID NO: 2927 - DNA, 21 bp, Influenza A
aatggtaggtcttcctttttc

SEQ ID NO: 2928 - DNA, 19 bp, Influenza A
cattctgaaggattgcagc

SEQ ID NO: 2929 - DNA, 20 bp, Influenza A
aacaggttgacacaatcatg

SEQ ID NO: 2930 - DNA, 19 bp, Influenza A
cagcacaaaccattttgag

SEQ ID NO: 2931 - DNA, 22 bp, Influenza A
ctgatcaagaagaataatgtgt

SEQ ID NO: 2932 - DNA, 17 bp, Influenza A
gtcacacatgctcagga

SEQ ID NO: 2933 - DNA, 17 bp, Influenza A
agaaggccaatccagcc

SEQ ID NO: 2934 - DNA, 19 bp, Influenza A
catacctgggaaagtcctc

SEQ ID NO: 2935 - DNA, 22 bp, Influenza A
aagaactgaagcatttaatgag

SEQ ID NO: 2936 - DNA, 21 bp, Influenza A
gaactgaagcatttaatgagc

SEQ ID NO: 2937 - DNA, 21 bp, Influenza A
gtgatgaattcctgaatgtac

SEQ ID NO: 2938 - DNA, 19 bp, Influenza A
caaaaaaggggactcaaca

SEQ ID NO: 2939 - DNA, 22 bp, Influenza A
cttcttcttgcaatagttagtc

SEQ ID NO: 2940 - DNA, 21 bp, Influenza A
ggtcttcttttttcaggaatg

SEQ ID NO: 2941 - DNA, 16 bp, Influenza A
gccagtccagccaatg

SEQ ID NO: 2942 - DNA, 18 bp, Influenza A
aaggattgcagtgtagct

SEQ ID NO: 2943 - DNA, 17 bp, Influenza A
gaaggccaatccagtca

SEQ ID NO: 2944 - DNA, 16 bp, Influenza A
ggagaaggccagtcca

SEQ ID NO: 2945 - DNA, 21 bp, Influenza A
ataaagaggacctacaacaac

SEQ ID NO: 2946 - DNA, 22 bp, Influenza A
aatggtagatcttcctttttca

SEQ ID NO: 2947 - DNA, 21 bp, Influenza A
agcacaaatcattttgagaaa

SEQ ID NO: 2948 - DNA, 20 bp, Influenza A
caatggtaggtcttcctttt

SEQ ID NO: 2949 - DNA, 19 bp, Influenza A
aagcatttaatgagcagca

SEQ ID NO: 2950 - DNA, 21 bp, Influenza A
acatactggaaaaagaacaca

SEQ ID NO: 2951 - DNA, 21 bp, Influenza A
ggacatactggaaaaagaaca

SEQ ID NO: 2952 - DNA, 19 bp, Influenza A
gaagcatttaatgagcagc

SEQ ID NO: 2953 - DNA, 19 bp, Influenza A
cagcatgttcataccaggg

SEQ ID NO: 2954 - DNA, 20 bp, Influenza A
ctcattttgaaggattgcag

SEQ ID NO: 2955 - DNA, 21 bp, Influenza A
gacatactggaaaaagaacac

SEQ ID NO: 2956 - DNA, 20 bp, Influenza A
catacaatggtaggtcttcc

SEQ ID NO: 2957 - DNA, 24 bp, Influenza A
caataaagaggacttacaataaca

SEQ ID NO: 2958 - DNA, 21 bp, Influenza A
caatgtgtgatgaattccaag

SEQ ID NO: 2959 - DNA, 20 bp, Influenza A
atacaatggtaggtcttcct

SEQ ID NO: 2960 - DNA, 19 bp, Influenza A
aatgagcagcacaaatcat

SEQ ID NO: 2961 - DNA, 21 bp, Influenza A
atggtagatcttcctttttca

SEQ ID NO: 2962 - DNA, 17 bp, Influenza A
ccagggaaagtcctcct

SEQ ID NO: 2963 - DNA, 19 bp, Influenza A
aatgagcagcacaaatcac

SEQ ID NO: 2964 - DNA, 21 bp, Influenza A
caatgtgtgatgaattcttga

SEQ ID NO: 2965 - DNA, 16 bp, Influenza A
gaaggccaatccagcc

SEQ ID NO: 2966 - DNA, 20 bp, Influenza A
gatggtaggtcttccttttt

SEQ ID NO: 2967 - DNA, 16 bp, Influenza A
gggagaaggccagtcc

SEQ ID NO: 2968 - DNA, 18 bp, Influenza A
ccatacctgggaaagtcc

SEQ ID NO: 2969 - DNA, 18 bp, Influenza A
aagcccctcattctgaag

SEQ ID NO: 2970 - DNA, 18 bp, Influenza A
agcatgcccatacaatgg

SEQ ID NO: 2971 - DNA, 19 bp, Influenza A
catgcccatacaatggtag

SEQ ID NO: 2972 - DNA, 20 bp, Influenza A
atgaattcctgaatgtaccg

SEQ ID NO: 2973 - DNA, 21 bp, Influenza A
ataaagaggacctacaacaat

SEQ ID NO: 2974 - DNA, 22 bp, Influenza A
atcaaagctggtcatatatagt

SEQ ID NO: 2975 - DNA, 21 bp, Influenza A
acttattggatcaggagaaag

SEQ ID NO: 2976 - DNA, 18 bp, Influenza A
ggtgatcaaagctggtca

SEQ ID NO: 2977 - DNA, 21 bp, Influenza A
acttattggatcaggagaaaa

SEQ ID NO: 2978 - DNA, 22 bp, Influenza A
caaagctggtcatatatagtgg

SEQ ID NO: 2979 - DNA, 22 bp, Influenza A
atttgaaatgtttcccaaaagt

SEQ ID NO: 2980 - DNA, 19 bp, Influenza A
gcacttattggatcaggag

SEQ ID NO: 2981 - DNA, 22 bp, Influenza A
aaatgtttcccaaaagtacatg

SEQ ID NO: 2982 - DNA, 20 bp, Influenza A
aggaagaaagattctgcaag

SEQ ID NO: 2983 - DNA, 19 bp, Influenza A
aggcacttattggatcagg

SEQ ID NO: 2984 - DNA, 21 bp, Influenza A
gatgtttcccaaaagtacatg

SEQ ID NO: 2985 - DNA, 18 bp, Influenza A
cttggtgatcaaagctgg

SEQ ID NO: 2986 - DNA, 21 bp, Influenza A
aaagctggtcatatatagtgg

SEQ ID NO: 2987 - DNA, 21 bp, Influenza A
aagtggatacgatacttgaga

SEQ ID NO: 2988 - DNA, 20 bp, Influenza A
attggatcaggagaaagagt

SEQ ID NO: 2989 - DNA, 20 bp, Influenza A
gaaggaagaaagattctgca

SEQ ID NO: 2990 - DNA, 23 bp, Influenza A
gtagagagatttgaaatgtttcc

SEQ ID NO: 2991 - DNA, 21 bp, Influenza A
atttgagatgtttcccaaaag

SEQ ID NO: 2992 - DNA, 19 bp, Influenza A
cctattgcttggtgatcaa

SEQ ID NO: 2993 - DNA, 18 bp, Influenza A
actgctcgataccgtact

SEQ ID NO: 2994 - DNA, 18 bp, Influenza A
ccggaaagtcagacaaga

SEQ ID NO: 2995 - DNA, 20 bp, Influenza A
ctacagaaacctcctatgga

SEQ ID NO: 2996 - DNA, 19 bp, Influenza A
acctacagctcaaaatggg

SEQ ID NO: 2997 - DNA, 21 bp, Influenza A
aagaaagattctgcaagatct

SEQ ID NO: 2998 - DNA, 21 bp, Influenza A
ccaaaaggaagaaagattctg

SEQ ID NO: 2999 - DNA, 23 bp, Influenza A
aaagctggtcatatatagtagaa

SEQ ID NO: 3000 - DNA, 23 bp, Influenza A
agtagagagatttgaaatgtttc

SEQ ID NO: 3001 - DNA, 21 bp, Influenza A
aagaagaaagattctgcaaga

SEQ ID NO: 3002 - DNA, 20 bp, Influenza A
ctgaaggcacttattggatc

SEQ ID NO: 3003 - DNA, 21 bp, Influenza A
gagatttgaaatgtttcccaa

SEQ ID NO: 3004 - DNA, 19 bp, Influenza A
cgtccttctacagaaacct

SEQ ID NO: 3005 - DNA, 22 bp, Influenza A
gagaatcaaaaggaagaaagat

SEQ ID NO: 3006 - DNA, 21 bp, Influenza A
agatttgaaatgtttcccaaa

SEQ ID NO: 3007 - DNA, 20 bp, Influenza A
aaaagaatgtaaccgtcaca

SEQ ID NO: 3008 - DNA, 21 bp, Influenza A
aagtggatacgatacttgaaa

SEQ ID NO: 3009 - DNA, 18 bp, Influenza A
gtaaccgtcacacactca

SEQ ID NO: 3010 - DNA, 23 bp, Influenza A
gagtagagagatttgaaatgttt

SEQ ID NO: 3011 - DNA, 22 bp, Influenza A
aagaaagattctgcaagatttt

SEQ ID NO: 3012 - DNA, 23 bp, Influenza A
catatatagtggaaagacctaca

SEQ ID NO: 3013 - DNA, 19 bp, Influenza A
gtaccatagagggttggat

SEQ ID NO: 3014 - DNA, 20 bp, Influenza A
ctcattggatcaggagaaag

SEQ ID NO: 3015 - DNA, 19 bp, Influenza A
actgaaggcacttattgga

SEQ ID NO: 3016 - DNA, 21 bp, Influenza A
ctaaaggcacttattggatca

SEQ ID NO: 3017 - DNA, 20 bp, Influenza A
aatttgatacacaccaaggt

SEQ ID NO: 3018 - DNA, 19 bp, Influenza A
gtagaagaactgaaggcac

SEQ ID NO: 3019 - DNA, 22 bp, Influenza A
aaagattctgcaagatattgaa

SEQ ID NO: 3020 - DNA, 22 bp, Influenza A
ccaaaaagaagaaagattctgc

SEQ ID NO: 3021 - DNA, 20 bp, Influenza A
gaaaagaatgtaaccgtcac

SEQ ID NO: 3022 - DNA, 19 bp, Influenza A
ggatcaggagaaagggtag

SEQ ID NO: 3023 - DNA, 19 bp, Influenza A
ccatagagggttggatctt

SEQ ID NO: 3024 - DNA, 20 bp, Influenza A
gaaagacctacagctcaaaa

SEQ ID NO: 3025 - DNA, 19 bp, Influenza A
gaagaaaggttctgcaaga

SEQ ID NO: 3026 - DNA, 20 bp, Influenza A
agaactgaaggcacttattg

SEQ ID NO: 3027 - DNA, 18 bp, Influenza A
ccaaaagtacatgggcag

SEQ ID NO: 3028 - DNA, 18 bp, Influenza A
gccatttgaacacatcca

SEQ ID NO: 3029 - DNA, 19 bp, Influenza A
gtcacacactcagttgaat

SEQ ID NO: 3030 - DNA, 18 bp, Influenza A
gctcaaaatgggatctgc

SEQ ID NO: 3031 - DNA, 20 bp, Influenza A
ggatcaggagaaagagtaga

SEQ ID NO: 3032 - DNA, 20 bp, Influenza A
accatagaaggttggatctt

SEQ ID NO: 3033 - DNA, 19 bp, Influenza A
gacctactgctcaaaatgg

SEQ ID NO: 3034 - DNA, 20 bp, Influenza A
gaggaaagattctgcaagat

SEQ ID NO: 3035 - DNA, 21 bp, Influenza A
aaagattctgcaagatcatga

SEQ ID NO: 3036 - DNA, 22 bp, Influenza A
acagaaaccttctatggataat

SEQ ID NO: 3037 - DNA, 22 bp, Influenza A
gagaaagagtagagagatttga

SEQ ID NO: 3038 - DNA, 21 bp, Influenza A
agaatcagaaggaagaaagat

SEQ ID NO: 3039 - DNA, 20 bp, Influenza A
acaacacaagtggatacaat

SEQ ID NO: 3040 - DNA, 22 bp, Influenza A
aagaaaaaagattctgcaagat

SEQ ID NO: 3041 - DNA, 23 bp, Influenza A
aaagagtagagagatttgaaatg

SEQ ID NO: 3042 - DNA, 18 bp, Influenza A
aagtacatgggcaggagt

SEQ ID NO: 3043 - DNA, 19 bp, Influenza A
cagctcaaaatgggatctg

SEQ ID NO: 3044 - DNA, 22 bp, Influenza A
aatcagaaggaagaaagattct

SEQ ID NO: 3045 - DNA, 19 bp, Influenza A
acaattcgacaacacaagt

SEQ ID NO: 3046 - DNA, 22 bp, Influenza A
caacacaagtggatacaatatt

SEQ ID NO: 3047 - DNA, 19 bp, Influenza A
agtagaagaactgaaggca

SEQ ID NO: 3048 - DNA, 19 bp, Influenza A
caacacaagtggatacgat

SEQ ID NO: 3049 - DNA, 23 bp, Influenza A
atagagagatttgaaatgtttcc

SEQ ID NO: 3050 - DNA, 19 bp, Influenza A
ccaaaagtacatggtcagg

SEQ ID NO: 3051 - DNA, 19 bp, Influenza A
agctcaaaatgggatctgt

SEQ ID NO: 3052 - DNA, 22 bp, Influenza A
aaaatcagaaggaagaaagatt

SEQ ID NO: 3053 - DNA, 19 bp, Influenza A
aaaggaagaaaggttctgc

SEQ ID NO: 3054 - DNA, 21 bp, Influenza A
gaatgaggtagaagaactgaa

SEQ ID NO: 3055 - DNA, 19 bp, Influenza A
cactcagttgaattgctgg

SEQ ID NO: 3056 - DNA, 21 bp, Influenza A
agaactaaaggcacttattgg

SEQ ID NO: 3057 - DNA, 19 bp, Influenza A
acttattggatcaggggaa

SEQ ID NO: 3058 - DNA, 19 bp, Influenza A
cccaaaagtacatggagag

SEQ ID NO: 3059 - DNA, 19 bp, Influenza A
ctcagttgaattgctggag

SEQ ID NO: 3060 - DNA, 21 bp, Influenza A
cacttattggatctggagaaa

SEQ ID NO: 3061 - DNA, 19 bp, Influenza A
ccaaaagtacatggacagg

SEQ ID NO: 3062 - DNA, 21 bp, Influenza A
aggagaaagagtagagagatt

SEQ ID NO: 3063 - DNA, 19 bp, Influenza A
ccggaaaatcagacaagat

SEQ ID NO: 3064 - DNA, 19 bp, Influenza A
atagagggttggatcttgg

SEQ ID NO: 3065 - DNA, 19 bp, Influenza A
gtctgacaagatctgcatt

SEQ ID NO: 3066 - DNA, 20 bp, Influenza A
ctaaggggatgtaccataga

SEQ ID NO: 3067 - DNA, 20 bp, Influenza A
gtcaattctcctctccaaat

SEQ ID NO: 3068 - DNA, 18 bp, Influenza A
caggagtagacaccagca

SEQ ID NO: 3069 - DNA, 23 bp, Influenza A
atacaaagatttgaaatgtttcc

SEQ ID NO: 3070 - DNA, 21 bp, Influenza A
aatagtggttcgtctttctac

SEQ ID NO: 3071 - DNA, 21 bp, Influenza A
gaaacctcctatggataacaa

SEQ ID NO: 3072 - DNA, 20 bp, Influenza A
atcaggagaaagggtagaga

SEQ ID NO: 3073 - DNA, 23 bp, Influenza A
attttgaatgaagtagaagaact

SEQ ID NO: 3074 - DNA, 22 bp, Influenza A
atatatagtggagagacctaca

SEQ ID NO: 3075 - DNA, 18 bp, Influenza A
agagggttggatcttggg

SEQ ID NO: 3076 - DNA, 19 bp, Influenza A
gctggagaatcaaaaggaa

SEQ ID NO: 3077 - DNA, 17 bp, Influenza A
agtacatgggcaggagt

SEQ ID NO: 3078 - DNA, 21 bp, Influenza A
gattctgcaagatattgaaca

SEQ ID NO: 3079 - DNA, 18 bp, Influenza A
acacatccaaacacccat

SEQ ID NO: 3080 - DNA, 17 bp, Influenza A
gccggaaagtcagacaa

SEQ ID NO: 3081 - DNA, 21 bp, Influenza A
gagagatttgaaatgtttccc

SEQ ID NO: 3082 - DNA, 19 bp, Influenza A
agctcaaaatgggatttgc

SEQ ID NO: 3083 - DNA, 19 bp, Influenza A
agctaaaggcacttattgg

SEQ ID NO: 3084 - DNA, 22 bp, Influenza A
aaggaagaaagattctgtagaa

SEQ ID NO: 3085 - DNA, 22 bp, Influenza A
gaatgaagtagaagaactgaag

SEQ ID NO: 3086 - DNA, 17 bp, Influenza A
agccggaaagtcagaca

SEQ ID NO: 3087 - DNA, 19 bp, Influenza A
aggagtagacaccaacagt

SEQ ID NO: 3088 - DNA, 17 bp, Influenza A
catgggcaggagtagac

SEQ ID NO: 3089 - DNA, 20 bp, Influenza A
atttgagatgtttcccagaa

SEQ ID NO: 3090 - DNA, 20 bp, Influenza A
cactcagttgaattgctaga

SEQ ID NO: 3091 - DNA, 19 bp, Influenza A
agttgaattgctggagaac

SEQ ID NO: 3092 - DNA, 22 bp, Influenza A
aaccaaaaagaagaaagattct

SEQ ID NO: 3093 - DNA, 17 bp, Influenza A
atgggcaggagtagaca

SEQ ID NO: 3094 - DNA, 18 bp, Influenza A
gtcacacactcagtcgaa

SEQ ID NO: 3095 - DNA, 17 bp, Influenza A
gggcaggagtagacacc

SEQ ID NO: 3096 - DNA, 16 bp, Influenza A
ggccggaaagtcagac

SEQ ID NO: 3097 - DNA, 20 bp, Influenza A
agttgaattgctggagaatc

SEQ ID NO: 3098 - DNA, 18 bp, Influenza A
agggaatccccaatgtga

SEQ ID NO: 3099 - DNA, 20 bp, Influenza A
cagctcaaaatgggatttgc

SEQ ID NO: 3100 - DNA, 20 bp, Influenza A
gcaagatattgaacaaggcc

SEQ ID NO: 3101 - DNA, 18 bp, Influenza A
ggggtaacaaaagcttgc

SEQ ID NO: 3102 - DNA, 21 bp, Influenza A
ctcaaaatggaatctgctacc

SEQ ID NO: 3103 - DNA, 20 bp, Influenza A
caaaaggaagaaaggttctg

SEQ ID NO: 3104 - DNA, 18 bp, Influenza A
actgagggcacttattgg

SEQ ID NO: 3105 - DNA, 20 bp, Influenza A
acaacacaagtgaatacgat

SEQ ID NO: 3106 - DNA, 17 bp, Influenza A
ggcaggagtagacaccc

SEQ ID NO: 3107 - DNA, 20 bp, Influenza A
acaagtggatacgatacctg

SEQ ID NO: 3108 - DNA, 18 bp, Influenza A
ggcaggagtagacactag

SEQ ID NO: 3109 - DNA, 19 bp, Influenza A
ggatgtaccatagagggtt

SEQ ID NO: 3110 - DNA, 20 bp, Influenza A
agattctgcaagatcatgaa

SEQ ID NO: 3111 - DNA, 21 bp, Influenza A
ctacccaggaattttgaatga

SEQ ID NO: 3112 - DNA, 18 bp, Influenza A
ctgagggcacttattgga

SEQ ID NO: 3113 - DNA, 21 bp, Influenza A
gaaagggtagagagatttgag

SEQ ID NO: 3114 - DNA, 20 bp, Influenza A
gagatgttccccaaaagtac

SEQ ID NO: 3115 - DNA, 16 bp, Influenza A
agtacatgggcagggg

SEQ ID NO: 3116 - DNA, 19 bp, Influenza A
aggatgtaccatagagggt

SEQ ID NO: 3117 - DNA, 18 bp, Influenza A
agggttggatattgggga

SEQ ID NO: 3118 - DNA, 18 bp, Influenza A
cacactcagtcgaattgc

SEQ ID NO: 3119 - DNA, 19 bp, Influenza A
gcaagattttgaacaaggc

SEQ ID NO: 3120 - DNA, 18 bp, Influenza A
acgcactcagttgaattg

SEQ ID NO: 3121 - DNA, 22 bp, Influenza A
gggatagttataggtaccattc

SEQ ID NO: 3122 - DNA, 20 bp, Influenza A
ggagaaagggtagagagatt

SEQ ID NO: 3123 - DNA, 21 bp, Influenza A
gagtagagaggtttgagatgt

SEQ ID NO: 3124 - DNA, 21 bp, Influenza A
cacgatacttgaaaggaatgt

SEQ ID NO: 3125 - DNA, 19 bp, Influenza A
catgggcaggagtaaatac

SEQ ID NO: 3126 - DNA, 18 bp, Influenza A
gggtaacaagagcttgcc

SEQ ID NO: 3127 - DNA, 18 bp, Influenza A
gaggagtagacaccagca

SEQ ID NO: 3128 - DNA, 21 bp, Influenza A
aagtagagaggtttgagatgt

SEQ ID NO: 3129 - DNA, 18 bp, Influenza A
cagttgagttgctggaga

SEQ ID NO: 3130 - DNA, 17 bp, Influenza A
aggagtagacaccagca

SEQ ID NO: 3131 - DNA, 18 bp, Influenza A
gcagaagaactgaaggca

SEQ ID NO: 3132 - DNA, 18 bp, Influenza A
agttgagttgctggagaa

SEQ ID NO: 3133 - DNA, 17 bp, Influenza A
gaacaaggcccctctcg

SEQ ID NO: 3134 - DNA, 18 bp, Influenza A
agaggagtagacaccagc

SEQ ID NO: 3135 - DNA, 19 bp, Influenza A
gggatgtaccatagaaggt

SEQ ID NO: 3136 - DNA, 20 bp, Influenza A
ctacccaggaactttgaatg

SEQ ID NO: 3137 - DNA, 20 bp, Influenza A
acatagtggaaagacctaca

SEQ ID NO: 3138 - DNA, 21 bp, Influenza A
ctcaaaatggaatttgctacc

SEQ ID NO: 3139 - DNA, 21 bp, Influenza A
agaagaactgaaagcacttat

SEQ ID NO: 3140 - DNA, 23 bp, Influenza A
atactattggttcatctttctac

SEQ ID NO: 3141 - DNA, 16 bp, Influenza A
aacaaggcccctctcg

SEQ ID NO: 3142 - DNA, 23 bp, Influenza A
gaatgaagtagaagaattgaagg

SEQ ID NO: 3143 - DNA, 19 bp, Influenza A
cccaggaactttgaatgaa

SEQ ID NO: 3144 - DNA, 17 bp, Influenza A
ggcatctgctacccagg

SEQ ID NO: 3145 - DNA, 20 bp, Influenza A
attgctggagaatcagaagg

SEQ ID NO: 3146 - DNA, 18 bp, Influenza A
cacaagtggatgcgatac

SEQ ID NO: 3147 - DNA, 19 bp, Influenza A
aggtaccattcttgacaga

SEQ ID NO: 3148 - DNA, 21 bp, Influenza A
actgaaggcacttattagatc

SEQ ID NO: 3149 - DNA, 18 bp, Influenza A
ctcgacctaaggggatgt

SEQ ID NO: 3150 - DNA, 16 bp, Influenza A
caaggcccctctcgac

SEQ ID NO: 3151 - DNA, 21 bp, Influenza A
gagaaagagtagagaggtttg

SEQ ID NO: 3152 - DNA, 18 bp, Influenza A
cagtggggtaacaaaagc

SEQ ID NO: 3153 - DNA, 19 bp, Influenza A
gatcttggggaatcctcaa

SEQ ID NO: 3154 - DNA, 21 bp, Influenza A
ataatagtggttcgtctttct

SEQ ID NO: 3155 - DNA, 18 bp, Influenza A
gggtaacaatagcttgcc

SEQ ID NO: 3156 - DNA, 17 bp, Influenza A
aaggcccctctcgattt

SEQ ID NO: 3157 - DNA, 22 bp, Influenza A
caatagtggttcttctttctac

SEQ ID NO: 3158 - DNA, 21 bp, Influenza A
caggagttttgaatgaagtag

SEQ ID NO: 3159 - DNA, 18 bp, Influenza A
ctcaaaatggcatctgct

SEQ ID NO: 3160 - DNA, 20 bp, Influenza A
gaatgtaccatagagggttg

SEQ ID NO: 3161 - DNA, 19 bp, Influenza A
aagtctgacaagatctgca

SEQ ID NO: 3162 - DNA, 18 bp, Influenza A
ggtgcgtctttctacaga

SEQ ID NO: 3163 - DNA, 18 bp, Influenza A
agcagtggggtaacaaag

SEQ ID NO: 3164 - DNA, 21 bp, Influenza A
aggtagatacgatacttgaga

SEQ ID NO: 3165 - DNA, 18 bp, Influenza A
gcttgcccctacaatagt

SEQ ID NO: 3166 - DNA, 18 bp, Influenza A
gatggttggatcttgggg

SEQ ID NO: 3167 - DNA, 18 bp, Influenza A
gcgacttattgcttggtg

SEQ ID NO: 3168 - DNA, 20 bp, Influenza A
ctacccaggagttttgaatg

SEQ ID NO: 3169 - DNA, 20 bp, Influenza A
ccaggagttttgaatgaagt

SEQ ID NO: 3170 - DNA, 20 bp, Influenza A
gctggaaaatcaaaaggaag

SEQ ID NO: 3171 - DNA, 19 bp, Influenza A
cctcaatgcgacctattgc

SEQ ID NO: 3172 - DNA, 19 bp, Influenza A
aatgcgacttattgcttgg

SEQ ID NO: 3173 - DNA, 17 bp, Influenza A
gcagtggggtaacaaga

SEQ ID NO: 3174 - DNA, 18 bp, Influenza A
cccaggagctttgaatga

SEQ ID NO: 3175 - DNA, 21 bp, Influenza A
atgtacaatagaaggttggat

SEQ ID NO: 3176 - DNA, 19 bp, Influenza A
ccaggagctttgaatgaag

SEQ ID NO: 3177 - DNA, 21 bp, Influenza A
aatgtgacctattacttggtg

SEQ ID NO: 3178 - DNA, 19 bp, Influenza A
cccaggagttttgaatgaa

SEQ ID NO: 3179 - DNA, 20 bp, Influenza A
attgctggaaaatcagaagg

SEQ ID NO: 3180 - DNA, 21 bp, Influenza A
cgaattgctagagaatcaaaa

SEQ ID NO: 3181 - DNA, 20 bp, Influenza A
gctcaaaatggaatttgcta

SEQ ID NO: 3182 - DNA, 20 bp, Influenza A
atcaggggaaagagtagaga

SEQ ID NO: 3183 - DNA, 19 bp, Influenza A
cccaatgcgacctattact

SEQ ID NO: 3184 - DNA, 18 bp, Influenza A
gaaagacctacagcccaa

SEQ ID NO: 3185 - DNA, 21 bp, Influenza A
ctcaaaatgggatctgttacc

SEQ ID NO: 3186 - DNA, 17 bp, Influenza A
atgggatctgctaccct

SEQ ID NO: 3187 - DNA, 21 bp, Influenza A
gggatgtactatagaaggttg

SEQ ID NO: 3188 - DNA, 20 bp, Influenza A
agaggatgtaccatagaagg

SEQ ID NO: 3189 - DNA, 19 bp, Influenza A
acacactctgttgaattgc

SEQ ID NO: 3190 - DNA, 19 bp, Influenza A
aacaaaagcttgcccttat

SEQ ID NO: 3191 - DNA, 22 bp, Influenza A
actttgaatgaaatagaagagc

SEQ ID NO: 3192 - DNA, 22 bp, Influenza A
caaaagcttgcccttataatag

SEQ ID NO: 3193 - DNA, 17 bp, Influenza A
ctctcgacctaagggga

SEQ ID NO: 3194 - DNA, 21 bp, Influenza A
atactagtggttcgtctttct

SEQ ID NO: 3195 - DNA, 19 bp, Influenza A
cgaaatgggatctgctacc

SEQ ID NO: 3196 - DNA, 17 bp, Influenza A
gggaaagacctacagcc

SEQ ID NO: 3197 - DNA, 17 bp, Influenza A
ccccaatgcgacctatt

SEQ ID NO: 3198 - DNA, 21 bp, Influenza A
cttgcccttataatagtggtt

SEQ ID NO: 3199 - DNA, 17 bp, Influenza A
gcccctctcgacttaag

SEQ ID NO: 3200 - DNA, 19 bp, Influenza A
agttgagttgctggaaaat

SEQ ID NO: 3201 - DNA, 20 bp, Influenza A
aggggatgtacaatagaagg

SEQ ID NO: 3202 - DNA, 19 bp, Influenza A
attgctggagaaccaaaag

SEQ ID NO: 3203 - DNA, 18 bp, Influenza A
gcccctctcgacttaaag

SEQ ID NO: 3204 - DNA, 16 bp, Influenza A
ggcccctctcgactta

SEQ ID NO: 3205 - DNA, 17 bp, Influenza A
cggagtagacaccagca

SEQ ID NO: 3206 - DNA, 20 bp, Influenza A
gcttgcccttataatagtgg

SEQ ID NO: 3207 - DNA, 16 bp, Influenza A
gcccctctcgacttga

SEQ ID NO: 3208 - DNA, 20 bp, Influenza A
aaaagcttgcccttataaca

SEQ ID NO: 3209 - DNA, 19 bp, Influenza A
aaggttggatattggggaa

SEQ ID NO: 3210 - DNA, 20 bp, Influenza A
acctaagggaatgtaccata

SEQ ID NO: 3211 - DNA, 18 bp, Influenza A
aatgcaccatagagggtt

SEQ ID NO: 3212 - DNA, 15 bp, Influenza A
aggcccctctcgacc

SEQ ID NO: 3213 - DNA, 21 bp, Influenza A
ggaaaagggtagagagatttg

SEQ ID NO: 3214 - DNA, 19 bp, Influenza A
agtagacaccaatagtggg

SEQ ID NO: 3215 - DNA, 20 bp, Influenza A
ctgtttaatctgctttcagc

SEQ ID NO: 3216 - DNA, 19 bp, Influenza A
cattggctcaggagaaaga

SEQ ID NO: 3217 - DNA, 18 bp, Influenza A
atgtaccatggagggttg

SEQ ID NO: 3218 - DNA, 18 bp, Influenza A
cactagcagtggggtaac

SEQ ID NO: 3219 - DNA, 18 bp, Influenza A
aacatgggatctgctacc

SEQ ID NO: 3220 - DNA, 18 bp, Influenza A
cttagggaacccccaatg

SEQ ID NO: 3221 - DNA, 21 bp, Influenza A
ggaaaaagggtagagagattt

SEQ ID NO: 3222 - DNA, 22 bp, Influenza A
gaaccaaaaagaagaaagattc

SEQ ID NO: 3223 - DNA, 19 bp, Influenza A
cccctacaatagtggttct

SEQ ID NO: 3224 - DNA, 17 bp, Influenza A
ggaatccccaatgcgac

SEQ ID NO: 3225 - DNA, 18 bp, Influenza A
ggagggttggatattggg

SEQ ID NO: 3226 - DNA, 18 bp, Influenza A
aaggcctactgctcaaaa

SEQ ID NO: 3227 - DNA, 18 bp, Influenza A
agtaacaaaagcttgccc

SEQ ID NO: 3228 - DNA, 23 bp, Influenza A
aattactggagaatcaaaaagaa

SEQ ID NO: 3229 - DNA, 19 bp, Influenza A
ctcttgacctaaggggatg

SEQ ID NO: 3230 - DNA, 20 bp, Influenza A
aagaggatgtaccatagagg

SEQ ID NO: 3231 - DNA, 15 bp, Influenza A
ctggcagcagccgga

SEQ ID NO: 3232 - DNA, 20 bp, Influenza A
agtggagtaacaaaagcttg

SEQ ID NO: 3233 - DNA, 21 bp, Influenza A
atgaggtagaagaactaaagg

SEQ ID NO: 3234 - DNA, 20 bp, Influenza A
cagtagtggggtaacaaaag

SEQ ID NO: 3235 - DNA, 17 bp, Influenza A
gggtagacaccagcagt

SEQ ID NO: 3236 - DNA, 19 bp, Influenza A
atcaggagaaaggatcgaa

SEQ ID NO: 3237 - DNA, 18 bp, Influenza A
aacgaccggaaaatcaga

SEQ ID NO: 3238 - DNA, 20 bp, Influenza A
gagaatgtaccatagagggt

SEQ ID NO: 3239 - DNA, 18 bp, Influenza A
agaagaatgtcaccgtca

SEQ ID NO: 3240 - DNA, 15 bp, Influenza A
ggcagcagccggaag

SEQ ID NO: 3241 - DNA, 20 bp, Influenza A
cgacttaagaggatgtacca

SEQ ID NO: 3242 - DNA, 16 bp, Influenza A
acaagagcttgcccct

SEQ ID NO: 3243 - DNA, 19 bp, Influenza A
attgctggagaaccaaaaa

SEQ ID NO: 3244 - DNA, 20 bp, Influenza A
atagaagagctaaaggcact

SEQ ID NO: 3245 - DNA, 15 bp, Influenza A
caaggccccactcga

SEQ ID NO: 3246 - DNA, 19 bp, Influenza A
gctggagaaccaaaaagaa

SEQ ID NO: 3247 - DNA, 18 bp, Influenza A
cagctcgaaatgggatct

SEQ ID NO: 3248 - DNA, 21 bp, Influenza A
cgatttaagaggatgtaccat

SEQ ID NO: 3249 - DNA, 18 bp, Influenza A
ctcaaaacgggatctgct

SEQ ID NO: 3250 - DNA, 18 bp, Influenza A
agacaggatctgcatcgg

SEQ ID NO: 3251 - DNA, 17 bp, Influenza A
ggctgcaccatagaggg

SEQ ID NO: 3252 - DNA, 19 bp, Influenza A
gagtagataccagcagtgg

SEQ ID NO: 3253 - DNA, 20 bp, Influenza A
agttgctggaaaatcagaag

SEQ ID NO: 3254 - DNA, 17 bp, Influenza A
gtcacgcactcagttga

SEQ ID NO: 3255 - DNA, 20 bp, Influenza A
aatagaagagctaaaggcac

SEQ ID NO: 3256 - DNA, 18 bp, Influenza A
aaagacccacagctcaaa

SEQ ID NO: 3257 - DNA, 18 bp, Influenza A
atattggcaacaaccgga

SEQ ID NO: 3258 - DNA, 20 bp, Influenza A
atgaggttgaagaactgaag

SEQ ID NO: 3259 - DNA, 19 bp, Influenza A
agaggatgtaccatggagg

SEQ ID NO: 3260 - DNA, 18 bp, Influenza A
gtaacaaaggcttgccct

SEQ ID NO: 3261 - DNA, 16 bp, Influenza A
gccccactcgacctaa

SEQ ID NO: 3262 - DNA, 18 bp, Influenza A
agtggaaaggcctactgc

SEQ ID NO: 3263 - DNA, 19 bp, Influenza A
gctgaatgaggttgaagaa

SEQ ID NO: 3264 - DNA, 22 bp, Influenza A
ccttaaatgaggtagaagaact

SEQ ID NO: 3265 - DNA, 21 bp, Influenza A
agagtggagagatttgaaatg

SEQ ID NO: 3266 - DNA, 18 bp, Influenza A
aggatgtaccatggaggg

SEQ ID NO: 3267 - DNA, 19 bp, Influenza A
aggatgtaccattgagggt

SEQ ID NO: 3268 - DNA, 21 bp, Influenza A
catatactactggttcgtctt

SEQ ID NO: 3269 - DNA, 18 bp, Influenza A
accagcagtggagtaaca

SEQ ID NO: 3270 - DNA, 19 bp, Influenza A
aggttctgcaaagtcttga

SEQ ID NO: 3271 - DNA, 19 bp, Influenza A
aaaggttctgcaaagtctt

SEQ ID NO: 3272 - DNA, 19 bp, Influenza A
gcaaagtcttgaacagagc

SEQ ID NO: 3273 - DNA, 19 bp, Influenza A
caaagtcttgaacagagcc

SEQ ID NO: 3274 - DNA, 18 bp, Influenza A
gcaagtggacacgatact

SEQ ID NO: 3275 - DNA, 18 bp, Influenza A
caggagtgctgaatgagg

SEQ ID NO: 3276 - DNA, 18 bp, Influenza A
aaggctgcaccatagagg

SEQ ID NO: 3277 - DNA, 18 bp, Influenza A
caccaacagtggggtaac

SEQ ID NO: 3278 - DNA, 21 bp, Influenza A
cacaggtagatacgatacttg

SEQ ID NO: 3279 - DNA, 17 bp, Influenza A
ctacccaggagtgctga

SEQ ID NO: 3280 - DNA, 21 bp, Influenza A
aattactggagaaccaaaaag

SEQ ID NO: 3281 - DNA, 19 bp, Influenza A
caatagtggggtgtcaagt

SEQ ID NO: 3282 - DNA, 20 bp, Influenza A
attgtggaaagacctactgc

SEQ ID NO: 3283 - DNA, 24 bp, Influenza A
gatagcatacaaagatttgaaatg

SEQ ID NO: 3284 - DNA, 20 bp, Influenza A
ctaagggaatgcaccataga

SEQ ID NO: 3285 - DNA, 20 bp, Influenza A
aggagaaagagttgagagat

SEQ ID NO: 3286 - DNA, 18 bp, Influenza A
aagtgcttgcccgtatac

SEQ ID NO: 3287 - DNA, 18 bp, Influenza A
accaatagtggggtgtca

SEQ ID NO: 3288 - DNA, 23 bp, Influenza A
agatagcatacaaagatttgaaa

SEQ ID NO: 3289 - DNA, 19 bp, Influenza A
atagtggggtatcaagtgc

SEQ ID NO: 3290 - DNA, 20 bp, Influenza A
ctctcgacttaagggaatgt

SEQ ID NO: 3291 - DNA, 19 bp, Influenza A
aatgaggcagaagaactga

SEQ ID NO: 3292 - DNA, 19 bp, Influenza A
aactcgacaacacaagtgg

SEQ ID NO: 3293 - DNA, 19 bp, Influenza A
aacaactcgacaacacaag

SEQ ID NO: 3294 - DNA, 19 bp, Influenza A
cccgtatactactggttcg

SEQ ID NO: 3295 - DNA, 19 bp, Influenza A
aaagtcttgaacaaagccc

SEQ ID NO: 3296 - DNA, 15 bp, Influenza A
accagcagtggggtg

SEQ ID NO: 3297 - DNA, 19 bp, Influenza A
ggggtagacaccaatagtg

SEQ ID NO: 3298 - DNA, 22 bp, Influenza A
caagtggacacaatattagaga

SEQ ID NO: 3299 - DNA, 20 bp, Influenza A
atcctgcccttattctactg

SEQ ID NO: 3300 - DNA, 15 bp, Influenza A
acaccagcagtgggg

SEQ ID NO: 3301 - DNA, 17 bp, Influenza A
aagagcttgcccctaca

SEQ ID NO: 3302 - DNA, 19 bp, Influenza A
cccaggaaccttaaatgag

SEQ ID NO: 3303 - DNA, 21 bp, Influenza A
ctgcagagtcttgaataaagc

SEQ ID NO: 3304 - DNA, 21 bp, Influenza A
aaccagaaggagaatagattc

SEQ ID NO: 3305 - DNA, 17 bp, Influenza A
acttgaaaggctgcacc

SEQ ID NO: 3306 - DNA, 18 bp, Influenza A
ccccgacaatagtggttc

SEQ ID NO: 3307 - DNA, 19 bp, Influenza A
agtggaacaacaagatcct

SEQ ID NO: 3308 - DNA, 21 bp, Influenza A
atatagtagagaggcctgatg

SEQ ID NO: 3309 - DNA, 22 bp, Influenza A
aatgtgatctattacttggtga

SEQ ID NO: 3310 - DNA, 20 bp, Influenza A
aagagtagcgagatttgaaa

SEQ ID NO: 3311 - DNA, 20 bp, Influenza A
ccgatgtgataacttactcg

SEQ ID NO: 3312 - DNA, 20 bp, Influenza A
ccccgatgtgataacttact

SEQ ID NO: 3313 - DNA, 20 bp, Influenza A
aacttactcggtgatcaaag

SEQ ID NO: 3314 - DNA, 20 bp, Influenza A
aacagtggaacaacaagatc

SEQ ID NO: 3315 - DNA, 18 bp, Influenza A
aacaacaagatcctgccc

SEQ ID NO: 3316 - DNA, 20 bp, Influenza A
gtacatggtcaggagtaaac

SEQ ID NO: 3317 - DNA, 20 bp, Influenza A
ggagttttgaatgaagcaga

SEQ ID NO: 3318 - DNA, 19 bp, Influenza A
ggatctaatggactgcacc

SEQ ID NO: 3319 - DNA, 19 bp, Influenza A
atctaatggactgcaccac

SEQ ID NO: 3320 - DNA, 19 bp, Influenza A
aagcactcattgggtctat

SEQ ID NO: 3321 - DNA, 17 bp, Influenza A
gggtgtcaagtgcttgc

SEQ ID NO: 3322 - DNA, 17 bp, Influenza A
cacctggcaaggagttg

SEQ ID NO: 3323 - DNA, 17 bp, Influenza A
acactagcagtggggta

SEQ ID NO: 3324 - DNA, 17 bp, Influenza A
ggcaaggagttgacacc

SEQ ID NO: 3325 - DNA, 21 bp, Influenza A
ccttataacagtggttcatct

SEQ ID NO: 3326 - DNA, 21 bp, Influenza A
ggagtaaacactaacaatggg

SEQ ID NO: 3327 - DNA, 21 bp, Influenza A
aggagtaaacactaacaatgg

SEQ ID NO: 3328 - DNA, 21 bp, Influenza A
gatactaatagcggagttacg

SEQ ID NO: 3329 - DNA, 21 bp, Influenza A
ataagatctgatccgtactca

SEQ ID NO: 3330 - DNA, 20 bp, Influenza A
gggtagatactaatagcgga

SEQ ID NO: 3331 - DNA, 18 bp, Influenza A
aaagcactcattgggtct

SEQ ID NO: 3332 - DNA, 16 bp, Influenza A
gcacctggcaaggagt

SEQ ID NO: 3333 - DNA, 16 bp, Influenza A
aagcacctggcaagga

SEQ ID NO: 3334 - DNA, 16 bp, Influenza A
cccccaaagcacctgg

SEQ ID NO: 3335 - DNA, 19 bp, Influenza A
ctcctagagaaccagaagg

SEQ ID NO: 3336 - DNA, 19 bp, Influenza A
agagtcttgaataaagcgc

SEQ ID NO: 3337 - DNA, 20 bp, Influenza A
ctaacaatggggtaacaaga

SEQ ID NO: 3338 - DNA, 20 bp, Influenza A
cctagaaaaccagaaggaga

SEQ ID NO: 3339 - DNA, 17 bp, Influenza A
ggatccttggaaacccc

SEQ ID NO: 3340 - DNA, 21 bp, Influenza A
atggataacaaagaccaactc

SEQ ID NO: 3341 - DNA, 19 bp, Influenza A
catggtcaggagtaaacac

SEQ ID NO: 3342 - DNA, 18 bp, Influenza A
cgccactggatctaatgg

SEQ ID NO: 3343 - DNA, 18 bp, Influenza A
cactgaaggttggatcct

SEQ ID NO: 3344 - DNA, 18 bp, Influenza A
aagagctgaaagcactca

SEQ ID NO: 3345 - DNA, 18 bp, Influenza A
aggtcttgaacagagccc

SEQ ID NO: 3346 - DNA, 20 bp, Influenza A
aatggaagaactaaaggcac

SEQ ID NO: 3347 - DNA, 19 bp, Influenza A
gattttaaacaaggcccca

SEQ ID NO: 3348 - DNA, 17 bp, Influenza A
caagagcacgtggacag

SEQ ID NO: 3349 - DNA, 18 bp, Influenza A
ggaacagcaagatcctgc

SEQ ID NO: 3350 - DNA, 19 bp, Influenza A
ggtctctaccagcaaatca

SEQ ID NO: 3351 - DNA, 16 bp, Influenza A
ggaaacccccgatgtg

SEQ ID NO: 3352 - DNA, 17 bp, Influenza A
gacaggatctgcatcgg

SEQ ID NO: 3353 - DNA, 19 bp, Influenza A
cagcaaatcagacaggatc

SEQ ID NO: 3354 - DNA, 19 bp, Influenza A
agcaaatcagacaggatct

SEQ ID NO: 3355 - DNA, 16 bp, Influenza A
ggttacgagcgcttgc

SEQ ID NO: 3356 - DNA, 18 bp, Influenza A
gaaatgttcccccaaagc

SEQ ID NO: 3357 - DNA, 16 bp, Influenza A
agttacgagcgcttgc

SEQ ID NO: 3358 - DNA, 17 bp, Influenza A
gcttgccccgacaatag

SEQ ID NO: 3359 - DNA, 18 bp, Influenza A
accagcaaatcagacagg

SEQ ID NO: 3360 - DNA, 15 bp, Influenza A
gaggcctgatgccca

SEQ ID NO: 3361 - DNA, 16 bp, Influenza A
aagagcacgtggaccg

SEQ ID NO: 3362 - DNA, 19 bp, Influenza A
cgtggacaggagtagatac

SEQ ID NO: 3363 - DNA, 18 bp, Influenza A
ggaatcctcaatgcgact

SEQ ID NO: 3364 - DNA, 19 bp, Influenza A
cccgtatactagtggttcg

SEQ ID NO: 3365 - DNA, 18 bp, Influenza A
ctactggtgatccgtctt

SEQ ID NO: 3366 - DNA, 15 bp, Influenza A
gagcttgccccgaca

SEQ ID NO: 3367 - DNA, 17 bp, Influenza A
agtgcttgcccgtatac

SEQ ID NO: 3368 - DNA, 19 bp, Influenza A
attgaaagagacggaggag

SEQ ID NO: 3369 - DNA, 20 bp, Influenza A
agaattgaaggcactcattg

SEQ ID NO: 3370 - DNA, 22 bp, Influenza A
cattctatgcagagatgaaatg

SEQ ID NO: 3371 - DNA, 21 bp, Influenza A
cttcattctatgcagagatga

SEQ ID NO: 3372 - DNA, 21 bp, Influenza A
ctttctatgcagagatgaagt

SEQ ID NO: 3373 - DNA, 21 bp, Influenza A
cttctatgcagagatgaagtg

SEQ ID NO: 3374 - DNA, 20 bp, Influenza A
ctatgcagagatgaagtggc

SEQ ID NO: 3375 - DNA, 22 bp, Influenza A
gaataagaactaatggagcaac

SEQ ID NO: 3376 - DNA, 21 bp, Influenza A
cggaataagaactaatggagc

SEQ ID NO: 3377 - DNA, 19 bp, Influenza A
gcggaataagaaccaatgg

SEQ ID NO: 3378 - DNA, 20 bp, Influenza A
gaataagaaccaatggagcg

SEQ ID NO: 3379 - DNA, 20 bp, Influenza A
ccttctatgcagagatgaag

SEQ ID NO: 3380 - DNA, 19 bp, Influenza A
agcggaataagaaccaatg

SEQ ID NO: 3381 - DNA, 20 bp, Influenza A
cgttctatgcagagatgaaa

SEQ ID NO: 3382 - DNA, 18 bp, Influenza A
ccccaatgtgaccaattc

SEQ ID NO: 3383 - DNA, 18 bp, Influenza A
cccaatgtgaccaattcc

SEQ ID NO: 3384 - DNA, 21 bp, Influenza A
catacagtggaataagaacca

SEQ ID NO: 3385 - DNA, 19 bp, Influenza A
caatgtgaccaattcctgg

SEQ ID NO: 3386 - DNA, 20 bp, Influenza A
ataagaaccaatggagcaac

SEQ ID NO: 3387 - DNA, 19 bp, Influenza A
acaatgtggacttctagga

SEQ ID NO: 3388 - DNA, 22 bp, Influenza A
gatcaggatcttcattctatgc

SEQ ID NO: 3389 - DNA, 20 bp, Influenza A
atcttcgttctatgcagaga

SEQ ID NO: 3390 - DNA, 19 bp, Influenza A
ggtcaatgtggacttctgg

SEQ ID NO: 3391 - DNA, 18 bp, Influenza A
gggacaatgtggacttct

SEQ ID NO: 3392 - DNA, 23 bp, Influenza A
ctatagtggaataagaaccaatg

SEQ ID NO: 3393 - DNA, 18 bp, Influenza A
caaaatatgccttgggca

SEQ ID NO: 3394 - DNA, 21 bp, Influenza A
aggatcttcattctatgcaga

SEQ ID NO: 3395 - DNA, 19 bp, Influenza A
cagagatgaaatggttgct

SEQ ID NO: 3396 - DNA, 20 bp, Influenza A
caggatcttcattctatgca

SEQ ID NO: 3397 - DNA, 21 bp, Influenza A
attctatgcggagatgaaatg

SEQ ID NO: 3398 - DNA, 19 bp, Influenza A
aatgggattcacatacagc

SEQ ID NO: 3399 - DNA, 22 bp, Influenza A
aataagaactaatggagcaacc

SEQ ID NO: 3400 - DNA, 21 bp, Influenza A
caggatcttcattctatgctg

SEQ ID NO: 3401 - DNA, 22 bp, Influenza A
accaattcctagaattttcagc

SEQ ID NO: 3402 - DNA, 21 bp, Influenza A
gaataagaaccaatggaacaa

SEQ ID NO: 3403 - DNA, 22 bp, Influenza A
cctatagtggaataagaaccaa

SEQ ID NO: 3404 - DNA, 19 bp, Influenza A
atgggattcacatacagcg

SEQ ID NO: 3405 - DNA, 20 bp, Influenza A
caatgggattcacatacagc

SEQ ID NO: 3406 - DNA, 20 bp, Influenza A
atctgctcaaaagggaaaaa

SEQ ID NO: 3407 - DNA, 21 bp, Influenza A
aataagaaccaatggaacaac

SEQ ID NO: 3408 - DNA, 20 bp, Influenza A
ccaatgtgaccaattcctag

SEQ ID NO: 3409 - DNA, 19 bp, Influenza A
ctgctcaaaagggaaaagg

SEQ ID NO: 3410 - DNA, 20 bp, Influenza A
caatgtgaccaattcctaga

SEQ ID NO: 3411 - DNA, 21 bp, Influenza A
cggaataagaactaatggaac

SEQ ID NO: 3412 - DNA, 20 bp, Influenza A
agtggaataagaaccaatgg

SEQ ID NO: 3413 - DNA, 19 bp, Influenza A
ccaggatctgctcaaaagg

SEQ ID NO: 3414 - DNA, 19 bp, Influenza A
atctgctcaaaagggaaac

SEQ ID NO: 3415 - DNA, 18 bp, Influenza A
gcagagatgaaatggctc

SEQ ID NO: 3416 - DNA, 20 bp, Influenza A
gtaggagatcaggatcttca

SEQ ID NO: 3417 - DNA, 19 bp, Influenza A
agatctgctcaaaagggaa

SEQ ID NO: 3418 - DNA, 19 bp, Influenza A
gctcaaaagggaaaaggac

SEQ ID NO: 3419 - DNA, 22 bp, Influenza A
atcttcattctatgctgagatg

SEQ ID NO: 3420 - DNA, 20 bp, Influenza A
cgacaaatgcagacaaaatt

SEQ ID NO: 3421 - DNA, 18 bp, Influenza A
agaaccaatggagcaacc

SEQ ID NO: 3422 - DNA, 22 bp, Influenza A
cacctatagtggaataagaacc

SEQ ID NO: 3423 - DNA, 20 bp, Influenza A
atgtaggagatcaggatctt

SEQ ID NO: 3424 - DNA, 21 bp, Influenza A
aattcctagaattttcagccg

SEQ ID NO: 3425 - DNA, 20 bp, Influenza A
aggagatcaggatcttcatt

SEQ ID NO: 3426 - DNA, 20 bp, Influenza A
acatacagcggaataagaac

SEQ ID NO: 3427 - DNA, 20 bp, Influenza A
gcggaataagaactaatgga

SEQ ID NO: 3428 - DNA, 21 bp, Influenza A
gaatgatgtctgttatcctgg

SEQ ID NO: 3429 - DNA, 20 bp, Influenza A
agcggaataagaactaatgg

SEQ ID NO: 3430 - DNA, 18 bp, Influenza A
aggatctgctcaaaaggg

SEQ ID NO: 3431 - DNA, 20 bp, Influenza A
aatgatgtctgttatcctgg

SEQ ID NO: 3432 - DNA, 20 bp, Influenza A
attcacatacagcggaataa

SEQ ID NO: 3433 - DNA, 19 bp, Influenza A
gatgccaattgtgaaggag

SEQ ID NO: 3434 - DNA, 18 bp, Influenza A
ggatctgctcaaaaggga

SEQ ID NO: 3435 - DNA, 20 bp, Influenza A
agacaatgggattcacatac

SEQ ID NO: 3436 - DNA, 20 bp, Influenza A
atgatgtctgttatcctgga

SEQ ID NO: 3437 - DNA, 22 bp, Influenza A
atcaattcctagaattttcagc

SEQ ID NO: 3438 - DNA, 23 bp, Influenza A
aaaattcacaaatgaagaatcac

SEQ ID NO: 3439 - DNA, 21 bp, Influenza A
aagagatcaggatcttcattc

SEQ ID NO: 3440 - DNA, 23 bp, Influenza A
catacagtggaataagaactaat

SEQ ID NO: 3441 - DNA, 22 bp, Influenza A
aattcacaaatgaagaatcact

SEQ ID NO: 3442 - DNA, 20 bp, Influenza A
gagacaatgggattcacata

SEQ ID NO: 3443 - DNA, 18 bp, Influenza A
accccaatgtgaccaatt

SEQ ID NO: 3444 - DNA, 21 bp, Influenza A
gaagtgatgtctgttatcctg

SEQ ID NO: 3445 - DNA, 21 bp, Influenza A
accaattcctagaattttcgg

SEQ ID NO: 3446 - DNA, 23 bp, Influenza A
ggtaaattcacaaatgaagaatc

SEQ ID NO: 3447 - DNA, 22 bp, Influenza A
ggaataagaactaatggaacaa

SEQ ID NO: 3448 - DNA, 23 bp, Influenza A
ggactaaagtaaacacattaact

SEQ ID NO: 3449 - DNA, 21 bp, Influenza A
gatcttcattctatgctgaga

SEQ ID NO: 3450 - DNA, 19 bp, Influenza A
ggcggaattgataaggaga

SEQ ID NO: 3451 - DNA, 19 bp, Influenza A
ataagaaccaatggagcga

SEQ ID NO: 3452 - DNA, 22 bp, Influenza A
attcacatacagtggaataaga

SEQ ID NO: 3453 - DNA, 22 bp, Influenza A
gattcacatacagtggaataag

SEQ ID NO: 3454 - DNA, 21 bp, Influenza A
ctacagcggaataagaactaa

SEQ ID NO: 3455 - DNA, 23 bp, Influenza A
gaaaattcacaaatgaagaatca

SEQ ID NO: 3456 - DNA, 21 bp, Influenza A
ggaaatgatgtctgttatcct

SEQ ID NO: 3457 - DNA, 22 bp, Influenza A
cacatatagtggaataagaacc

SEQ ID NO: 3458 - DNA, 20 bp, Influenza A
aagtgatgtctgttatcctg

SEQ ID NO: 3459 - DNA, 18 bp, Influenza A
gggattcacatacagcgg

SEQ ID NO: 3460 - DNA, 22 bp, Influenza A
gtctgttatcctggaaaatttg

SEQ ID NO: 3461 - DNA, 18 bp, Influenza A
acaaaatctgccttgggc

SEQ ID NO: 3462 - DNA, 20 bp, Influenza A
gtgaaggagattgctatcat

SEQ ID NO: 3463 - DNA, 19 bp, Influenza A
ggagacaatgggattcaca

SEQ ID NO: 3464 - DNA, 21 bp, Influenza A
cattaactgaaagaggagtgg

SEQ ID NO: 3465 - DNA, 19 bp, Influenza A
cccaatgtgaccaatttct

SEQ ID NO: 3466 - DNA, 19 bp, Influenza A
aggagacaatgggattcac

SEQ ID NO: 3467 - DNA, 21 bp, Influenza A
gataattgagcgaagagaagg

SEQ ID NO: 3468 - DNA, 21 bp, Influenza A
ggatcttcattctatgctgaa

SEQ ID NO: 3469 - DNA, 19 bp, Influenza A
gcatgtaggagatcaggat

SEQ ID NO: 3470 - DNA, 21 bp, Influenza A
caaatgaagaatcactgaggc

SEQ ID NO: 3471 - DNA, 20 bp, Influenza A
ctgttatcctgggaaattcg

SEQ ID NO: 3472 - DNA, 18 bp, Influenza A
atcatgccgtgtcaaacg

SEQ ID NO: 3473 - DNA, 21 bp, Influenza A
acaaatgaagaatcactgagg

SEQ ID NO: 3474 - DNA, 19 bp, Influenza A
caagatctgctcaaaaggg

SEQ ID NO: 3475 - DNA, 18 bp, Influenza A
catcatgccgtgtcaaac

SEQ ID NO: 3476 - DNA, 21 bp, Influenza A
aatcttcattctatgctgaga

SEQ ID NO: 3477 - DNA, 21 bp, Influenza A
atctgctcaaaaggaaaaagg

SEQ ID NO: 3478 - DNA, 22 bp, Influenza A
acaagttgataacagtaagaag

SEQ ID NO: 3479 - DNA, 22 bp, Influenza A
gggactaaagtaaacacattaa

SEQ ID NO: 3480 - DNA, 19 bp, Influenza A
gggtcttcattctatgcag

SEQ ID NO: 3481 - DNA, 19 bp, Influenza A
agttgatgccaattgtgat

SEQ ID NO: 3482 - DNA, 20 bp, Influenza A
gatgtctgttatcctggaaa

SEQ ID NO: 3483 - DNA, 20 bp, Influenza A
aatgaaatggcttctgtcaa

SEQ ID NO: 3484 - DNA, 19 bp, Influenza A
cttctgggaacaatcactg

SEQ ID NO: 3485 - DNA, 21 bp, Influenza A
cacattaactgaaagaggagt

SEQ ID NO: 3486 - DNA, 22 bp, Influenza A
atgtaagagatcaggatcttca

SEQ ID NO: 3487 - DNA, 20 bp, Influenza A
attaactgaaagaggagtgg

SEQ ID NO: 3488 - DNA, 19 bp, Influenza A
aactaatggagcaaccagt

SEQ ID NO: 3489 - DNA, 19 bp, Influenza A
cagacaaaatttgccttgg

SEQ ID NO: 3490 - DNA, 18 bp, Influenza A
ccgacaaatgcagacaag

SEQ ID NO: 3491 - DNA, 20 bp, Influenza A
ataattgagcgaagagaagg

SEQ ID NO: 3492 - DNA, 19 bp, Influenza A
agtgcatgtaggagatcag

SEQ ID NO: 3493 - DNA, 21 bp, Influenza A
caaacgggactaaagtaaaca

SEQ ID NO: 3494 - DNA, 21 bp, Influenza A
aattgataaggagacaatggg

SEQ ID NO: 3495 - DNA, 19 bp, Influenza A
caaggagacaatgggattc

SEQ ID NO: 3496 - DNA, 21 bp, Influenza A
atttgataattgagcgaagag

SEQ ID NO: 3497 - DNA, 18 bp, Influenza A
caatgcaactgaaacggt

SEQ ID NO: 3498 - DNA, 21 bp, Influenza A
gacttctaggaaccctaatag

SEQ ID NO: 3499 - DNA, 19 bp, Influenza A
ccaagatctgctcaaaagg

SEQ ID NO: 3500 - DNA, 21 bp, Influenza A
gatttgataattgagcgaaga

SEQ ID NO: 3501 - DNA, 21 bp, Influenza A
aaggaagtgatgtctgttatc

SEQ ID NO: 3502 - DNA, 22 bp, Influenza A
agctaaaggagacaaaatatgt

SEQ ID NO: 3503 - DNA, 21 bp, Influenza A
agttcacaaatgaagaatcac

SEQ ID NO: 3504 - DNA, 19 bp, Influenza A
gaataagaaccaatggggc

SEQ ID NO: 3505 - DNA, 23 bp, Influenza A
gatttgataattgaacgaagaga

SEQ ID NO: 3506 - DNA, 21 bp, Influenza A
gaaacaatgggattcacatac

SEQ ID NO: 3507 - DNA, 21 bp, Influenza A
aaacacattaactgaaagagg

SEQ ID NO: 3508 - DNA, 20 bp, Influenza A
gcgaaataagaaccaatgga

SEQ ID NO: 3509 - DNA, 25 bp, Influenza A
aatatcaagaaaatatgtactcaag

SEQ ID NO: 3510 - DNA, 20 bp, Influenza A
gctcaaaagggaaaaagaca

SEQ ID NO: 3511 - DNA, 20 bp, Influenza A
attcctagaattttcagccg

SEQ ID NO: 3512 - DNA, 23 bp, Influenza A
aatgacaaagtcgtatagaaatc

SEQ ID NO: 3513 - DNA, 25 bp, Influenza A
atatcaagaaaatatgtactcaagg

SEQ ID NO: 3514 - DNA, 21 bp, Influenza A
cgttttatgcagagatgaaat

SEQ ID NO: 3515 - DNA, 18 bp, Influenza A
aagaaccaatggagcgac

SEQ ID NO: 3516 - DNA, 19 bp, Influenza A
ggcaatgggattcacatac

SEQ ID NO: 3517 - DNA, 21 bp, Influenza A
acaagatcaggttcttctttc

SEQ ID NO: 3518 - DNA, 23 bp, Influenza A
atttacaaatgaagaatcactga

SEQ ID NO: 3519 - DNA, 19 bp, Influenza A
gcggaattgataaggagac

SEQ ID NO: 3520 - DNA, 17 bp, Influenza A
caccccaatgtgaccaa

SEQ ID NO: 3521 - DNA, 18 bp, Influenza A
gctctgaggcaaattctc

SEQ ID NO: 3522 - DNA, 23 bp, Influenza A
gaattttcagccgatttaattat

SEQ ID NO: 3523 - DNA, 22 bp, Influenza A
caaaagtgaacacattaacaga

SEQ ID NO: 3524 - DNA, 22 bp, Influenza A
aaaagtgaacacattaacagag

SEQ ID NO: 3525 - DNA, 23 bp, Influenza A
aattttcagccgatttaattatt

SEQ ID NO: 3526 - DNA, 20 bp, Influenza A
acgggactaaagtaaacaca

SEQ ID NO: 3527 - DNA, 23 bp, Influenza A
aatttacaaatgaagaatcactg

SEQ ID NO: 3528 - DNA, 19 bp, Influenza A
aatgaagaatcactgaggc

SEQ ID NO: 3529 - DNA, 20 bp, Influenza A
gtcgttaatgcaactgaaac

SEQ ID NO: 3530 - DNA, 19 bp, Influenza A
agaatcactgaggcagatc

SEQ ID NO: 3531 - DNA, 20 bp, Influenza A
agtcgttaatgcaactgaaa

SEQ ID NO: 3532 - DNA, 17 bp, Influenza A
gagtcaggcggaattga

SEQ ID NO: 3533 - DNA, 18 bp, Influenza A
ggaatcaggcggaattga

SEQ ID NO: 3534 - DNA, 19 bp, Influenza A
gaatcactgaggcagatcc

SEQ ID NO: 3535 - DNA, 19 bp, Influenza A
aataagaaccaatggggcg

SEQ ID NO: 3536 - DNA, 20 bp, Influenza A
attgaagtagtgaatgccac

SEQ ID NO: 3537 - DNA, 23 bp, Influenza A
attttcagccgatttaattattg

SEQ ID NO: 3538 - DNA, 20 bp, Influenza A
attgataaggagacaatggg

SEQ ID NO: 3539 - DNA, 18 bp, Influenza A
aactgaaacggtggaacg

SEQ ID NO: 3540 - DNA, 22 bp, Influenza A
caaggtaaacacattaactgaa

SEQ ID NO: 3541 - DNA, 19 bp, Influenza A
aagaatcactgaggcagat

SEQ ID NO: 3542 - DNA, 19 bp, Influenza A
aattctcagggaatcaggc

SEQ ID NO: 3543 - DNA, 19 bp, Influenza A
agggtcttcattctatgcg

SEQ ID NO: 3544 - DNA, 20 bp, Influenza A
gggataagaaccaatggagc

SEQ ID NO: 3545 - DNA, 22 bp, Influenza A
ataagaactaatggagtaacca

SEQ ID NO: 3546 - DNA, 19 bp, Influenza A
atgaagaatcactgaggca

SEQ ID NO: 3547 - DNA, 18 bp, Influenza A
accagtgcatgtaggaga

SEQ ID NO: 3548 - DNA, 19 bp, Influenza A
gaggagtggaagtcgttaa

SEQ ID NO: 3549 - DNA, 19 bp, Influenza A
ggcaaatggaacaaaagtg

SEQ ID NO: 3550 - DNA, 20 bp, Influenza A
aacagtcttttgtaccgagt

SEQ ID NO: 3551 - DNA, 20 bp, Influenza A
cctaggaaccctaataggac

SEQ ID NO: 3552 - DNA, 18 bp, Influenza A
agaatcaggcggaattga

SEQ ID NO: 3553 - DNA, 19 bp, Influenza A
aggagtggaagtcgttaat

SEQ ID NO: 3554 - DNA, 21 bp, Influenza A
atatagcggaataagaaccaa

SEQ ID NO: 3555 - DNA, 20 bp, Influenza A
ccaatgtgatcaattcctgg

SEQ ID NO: 3556 - DNA, 19 bp, Influenza A
agtggaagtcgttaatgca

SEQ ID NO: 3557 - DNA, 20 bp, Influenza A
atgggattcacatacagtgg

SEQ ID NO: 3558 - DNA, 21 bp, Influenza A
aacggaactaaagtaaacaca

SEQ ID NO: 3559 - DNA, 20 bp, Influenza A
gacaaatgcagacaagatct

SEQ ID NO: 3560 - DNA, 19 bp, Influenza A
gcaaattctcagggaatca

SEQ ID NO: 3561 - DNA, 18 bp, Influenza A
aggcaaattctcagggag

SEQ ID NO: 3562 - DNA, 21 bp, Influenza A
agggaatgatgtctgttatcc

SEQ ID NO: 3563 - DNA, 18 bp, Influenza A
agatgaagtggttgctgt

SEQ ID NO: 3564 - DNA, 18 bp, Influenza A
atgaagtggttgctgtcg

SEQ ID NO: 3565 - DNA, 17 bp, Influenza A
catgccgtgtcaaacgg

SEQ ID NO: 3566 - DNA, 20 bp, Influenza A
cgggataagaactaatggag

SEQ ID NO: 3567 - DNA, 20 bp, Influenza A
aggaggaattgataaggagt

SEQ ID NO: 3568 - DNA, 20 bp, Influenza A
atgggtttcacctatagtgg

SEQ ID NO: 3569 - DNA, 20 bp, Influenza A
aatgggtttcacctatagtg

SEQ ID NO: 3570 - DNA, 18 bp, Influenza A
cactgaggcagatccttc

SEQ ID NO: 3571 - DNA, 19 bp, Influenza A
atgcagacaaaatttgcct

SEQ ID NO: 3572 - DNA, 19 bp, Influenza A
ggcagtaggaaaatgtccg

SEQ ID NO: 3573 - DNA, 18 bp, Influenza A
aatcactgaggcagatcc

SEQ ID NO: 3574 - DNA, 17 bp, Influenza A
accaccccaatgtgacc

SEQ ID NO: 3575 - DNA, 18 bp, Influenza A
cagagatgaagtggttgc

SEQ ID NO: 3576 - DNA, 22 bp, Influenza A
gaagttcacaaatgaagaatca

SEQ ID NO: 3577 - DNA, 16 bp, Influenza A
ccaccccaatgtgacc

SEQ ID NO: 3578 - DNA, 19 bp, Influenza A
aattctcagggagtcaggc

SEQ ID NO: 3579 - DNA, 18 bp, Influenza A
ataagaaccaatggggcg

SEQ ID NO: 3580 - DNA, 21 bp, Influenza A
gatcaggttcttccttctatg

SEQ ID NO: 3581 - DNA, 19 bp, Influenza A
ggagtggaaacaagttgat

SEQ ID NO: 3582 - DNA, 18 bp, Influenza A
acaaaatttgccttgggc

SEQ ID NO: 3583 - DNA, 18 bp, Influenza A
attctcagggaatcaggc

SEQ ID NO: 3584 - DNA, 19 bp, Influenza A
gggaaaaggacagttgacc

SEQ ID NO: 3585 - DNA, 20 bp, Influenza A
ggaggaattgataaggagtc

SEQ ID NO: 3586 - DNA, 21 bp, Influenza A
gataattgaacgaagagaagg

SEQ ID NO: 3587 - DNA, 20 bp, Influenza A
cacaagatcaggttcttctt

SEQ ID NO: 3588 - DNA, 21 bp, Influenza A
ggaaattcgtgaatgaagaag

SEQ ID NO: 3589 - DNA, 21 bp, Influenza A
ataattgaacgaagagaagga

SEQ ID NO: 3590 - DNA, 17 bp, Influenza A
gggaacaatcactgggc

SEQ ID NO: 3591 - DNA, 19 bp, Influenza A
agaaggaagtgatgtctgt

SEQ ID NO: 3592 - DNA, 19 bp, Influenza A
aaattctcagggagtcagg

SEQ ID NO: 3593 - DNA, 20 bp, Influenza A
gtcaatgggtttcacctata

SEQ ID NO: 3594 - DNA, 20 bp, Influenza A
gaatgcagacaaaatttgcc

SEQ ID NO: 3595 - DNA, 19 bp, Influenza A
aataggacctccccaatgc

SEQ ID NO: 3596 - DNA, 22 bp, Influenza A
catacaacggaataagaactaa

SEQ ID NO: 3597 - DNA, 18 bp, Influenza A
ctgggacaatgtggactt

SEQ ID NO: 3598 - DNA, 20 bp, Influenza A
ggaacaaaagtgaacacatt

SEQ ID NO: 3599 - DNA, 19 bp, Influenza A
aatgggcttcacctatagt

SEQ ID NO: 3600 - DNA, 21 bp, Influenza A
gtatagaaatcccaggaacaa

SEQ ID NO: 3601 - DNA, 18 bp, Influenza A
accctaataggacctccc

SEQ ID NO: 3602 - DNA, 17 bp, Influenza A
gcaactgaaacggtgga

SEQ ID NO: 3603 - DNA, 20 bp, Influenza A
aagaactaatggaacaacca

SEQ ID NO: 3604 - DNA, 17 bp, Influenza A
actgaaacggtggaacg

SEQ ID NO: 3605 - DNA, 17 bp, Influenza A
catgctgtggcaaatgg

SEQ ID NO: 3606 - DNA, 18 bp, Influenza A
ataagaaccaatggcgcg

SEQ ID NO: 3607 - DNA, 18 bp, Influenza A
atcctgggaaattcgtga

SEQ ID NO: 3608 - DNA, 18 bp, Influenza A
gatctgggacaatgtgga

SEQ ID NO: 3609 - DNA, 18 bp, Influenza A
attccgacaaatgcagac

SEQ ID NO: 3610 - DNA, 19 bp, Influenza A
agacaatgcttctttccca

SEQ ID NO: 3611 - DNA, 22 bp, Influenza A
aaatcgtatagaaatcccagaa

SEQ ID NO: 3612 - DNA, 21 bp, Influenza A
aggagatcagaatcttcattc

SEQ ID NO: 3613 - DNA, 20 bp, Influenza A
gaactaatggaacaaccagt

SEQ ID NO: 3614 - DNA, 22 bp, Influenza A
attttcagccgatctaattatt

SEQ ID NO: 3615 - DNA, 22 bp, Influenza A
agaattttcagccgatttaatt

SEQ ID NO: 3616 - DNA, 20 bp, Influenza A
aattcgtgaatgaagaagct

SEQ ID NO: 3617 - DNA, 18 bp, Influenza A
gggattcacatacagcga

SEQ ID NO: 3618 - DNA, 22 bp, Influenza A
aatctgatttgataattgagcg

SEQ ID NO: 3619 - DNA, 18 bp, Influenza A
cagtggaacgaacaaaca

SEQ ID NO: 3620 - DNA, 20 bp, Influenza A
ataagaaccaatggaacgac

SEQ ID NO: 3621 - DNA, 19 bp, Influenza A
caacagtcttttgtaccga

SEQ ID NO: 3622 - DNA, 19 bp, Influenza A
acaaggagacaatgggatt

SEQ ID NO: 3623 - DNA, 19 bp, Influenza A
gatcattccgacaaatgca

SEQ ID NO: 3624 - DNA, 20 bp, Influenza A
gtgatcaattcctggagttt

SEQ ID NO: 3625 - DNA, 21 bp, Influenza A
aattcctagaattttctgccg

SEQ ID NO: 3626 - DNA, 19 bp, Influenza A
ggatcttcgttctatgcag

SEQ ID NO: 3627 - DNA, 20 bp, Influenza A
attcgtgaatgaagaagctc

SEQ ID NO: 3628 - DNA, 22 bp, Influenza A
gacaataggattcacatacagc

SEQ ID NO: 3629 - DNA, 19 bp, Influenza A
acatacagcggaataagga

SEQ ID NO: 3630 - DNA, 24 bp, Influenza A
cgaatatcaagaaaatatgtactc

SEQ ID NO: 3631 - DNA, 20 bp, Influenza A
ataagaaccaatggagtgac

SEQ ID NO: 3632 - DNA, 21 bp, Influenza A
cggtaaattcacaaatgaaga

SEQ ID NO: 3633 - DNA, 20 bp, Influenza A
gggaaattcgtgaatgaaga

SEQ ID NO: 3634 - DNA, 20 bp, Influenza A
atcaggttcttcgttctatg

SEQ ID NO: 3635 - DNA, 23 bp, Influenza A
agttttcctctgatttgataatt

SEQ ID NO: 3636 - DNA, 20 bp, Influenza A
aaattcgtgaatgaagaagc

SEQ ID NO: 3637 - DNA, 20 bp, Influenza A
cggaataaggactaatggag

SEQ ID NO: 3638 - DNA, 19 bp, Influenza A
aaacagtggaacgaacaag

SEQ ID NO: 3639 - DNA, 23 bp, Influenza A
atatcaagaaaatatgcactcaa

SEQ ID NO: 3640 - DNA, 17 bp, Influenza A
cccaggatctgctcaca

SEQ ID NO: 3641 - DNA, 17 bp, Influenza A
gaaacggtggaacgaac

SEQ ID NO: 3642 - DNA, 17 bp, Influenza A
aacggtggaacgaacaa

SEQ ID NO: 3643 - DNA, 18 bp, Influenza A
ggaaaaggccaacagatc

SEQ ID NO: 3644 - DNA, 19 bp, Influenza A
gagagggggattgaagtag

SEQ ID NO: 3645 - DNA, 18 bp, Influenza A
aaaggacagttgacctcg

SEQ ID NO: 3646 - DNA, 20 bp, Influenza A
ggggattgaagtagtgaatg

SEQ ID NO: 3647 - DNA, 20 bp, Influenza A
aagatcaggttcttccttct

SEQ ID NO: 3648 - DNA, 18 bp, Influenza A
cgagatgaagtggttgct

SEQ ID NO: 3649 - DNA, 22 bp, Influenza A
gcagattactaagtcatacaaa

SEQ ID NO: 3650 - DNA, 19 bp, Influenza A
gaaatgtccgaggtatgtg

SEQ ID NO: 3651 - DNA, 20 bp, Influenza A
cctcaatgtgatcaattcct

SEQ ID NO: 3652 - DNA, 18 bp, Influenza A
caggcggaattgagaagg

SEQ ID NO: 3653 - DNA, 23 bp, Influenza A
gcgaatatcaagaaaatatgtac

SEQ ID NO: 3654 - DNA, 18 bp, Influenza A
acacagtcactttcagct

SEQ ID NO: 3655 - DNA, 19 bp, Influenza A
cggaacaaaagtgaacaca

SEQ ID NO: 3656 - DNA, 17 bp, Influenza A
accatgctgtggcaaac

SEQ ID NO: 3657 - DNA, 18 bp, Influenza A
aggcggaattgaaaagga

SEQ ID NO: 3658 - DNA, 24 bp, Influenza A
actgcgaatattaagaaaatatgt

SEQ ID NO: 3659 - DNA, 16 bp, Influenza A
caccatgctgtggcaa

SEQ ID NO: 3660 - DNA, 19 bp, Influenza A
caatgtgaccagttcctag

SEQ ID NO: 3661 - DNA, 21 bp, Influenza A
attcacaaatgaggaatcact

SEQ ID NO: 3662 - DNA, 20 bp, Influenza A
ggattgaagtagtgaatgcc

SEQ ID NO: 3663 - DNA, 19 bp, Influenza A
gaaccgatgtgtgctatcc

SEQ ID NO: 3664 - DNA, 18 bp, Influenza A
ctcggtcaatgtggactt

SEQ ID NO: 3665 - DNA, 18 bp, Influenza A
gagcgaagagaaggaacc

SEQ ID NO: 3666 - DNA, 19 bp, Influenza A
ctgcaaaagatcaggttct

SEQ ID NO: 3667 - DNA, 22 bp, Influenza A
aaattcacaaatgaagagtcac

SEQ ID NO: 3668 - DNA, 20 bp, Influenza A
gggataagaaccaatggaac

SEQ ID NO: 3669 - DNA, 19 bp, Influenza A
agggaaaaggacaattgac

SEQ ID NO: 3670 - DNA, 20 bp, Influenza A
agagaaggaaccgatgtatg

SEQ ID NO: 3671 - DNA, 17 bp, Influenza A
ctgaggcagatccttcg

SEQ ID NO: 3672 - DNA, 18 bp, Influenza A
gaagtcgtcaatgcaact

SEQ ID NO: 3673 - DNA, 19 bp, Influenza A
gaaccgatgtatgctatcc

SEQ ID NO: 3674 - DNA, 19 bp, Influenza A
gagtcaatgggtttcacct

SEQ ID NO: 3675 - DNA, 20 bp, Influenza A
agtgcatgtagaagatcagg

SEQ ID NO: 3676 - DNA, 18 bp, Influenza A
cgaagagaaggaaccgat

SEQ ID NO: 3677 - DNA, 21 bp, Influenza A
aagaatcactgagacagatcc

SEQ ID NO: 3678 - DNA, 20 bp, Influenza A
caaaagatcaggttcttcct

SEQ ID NO: 3679 - DNA, 19 bp, Influenza A
ctgactgaaagaggagtgg

SEQ ID NO: 3680 - DNA, 22 bp, Influenza A
actgcgaatatcaagaaaatat

SEQ ID NO: 3681 - DNA, 22 bp, Influenza A
aactgcgaatatcaagaaaata

SEQ ID NO: 3682 - DNA, 21 bp, Influenza A
cagttcctagaattttcagcc

SEQ ID NO: 3683 - DNA, 22 bp, Influenza A
agaaaatatgtactcaagggaa

SEQ ID NO: 3684 - DNA, 19 bp, Influenza A
aagtagtgaatgccacaga

SEQ ID NO: 3685 - DNA, 20 bp, Influenza A
cagaagatcaggttcttcct

SEQ ID NO: 3686 - DNA, 21 bp, Influenza A
atctaattattgagaggcgag

SEQ ID NO: 3687 - DNA, 17 bp, Influenza A
aacaatcactgggccac

SEQ ID NO: 3688 - DNA, 19 bp, Influenza A
ggaaaaggacaattgacct

SEQ ID NO: 3689 - DNA, 20 bp, Influenza A
acaggttcttccttctatgc

SEQ ID NO: 3690 - DNA, 19 bp, Influenza A
agtagtgaatgccacagag

SEQ ID NO: 3691 - DNA, 19 bp, Influenza A
gtagtgaatgccacagaga

SEQ ID NO: 3692 - DNA, 24 bp, Influenza A
agttttactctgatttgataattg

SEQ ID NO: 3693 - DNA, 19 bp, Influenza A
gggaaaaggacaattgacc

SEQ ID NO: 3694 - DNA, 18 bp, Influenza A
cagagagggggattgaag

SEQ ID NO: 3695 - DNA, 18 bp, Influenza A
aggcaatgggattcacat

SEQ ID NO: 3696 - DNA, 20 bp, Influenza A
accaattcctggaattttca

SEQ ID NO: 3697 - DNA, 21 bp, Influenza A
aatgaagaatcactgagacag

SEQ ID NO: 3698 - DNA, 20 bp, Influenza A
ggattgaagtagtgaatgca

SEQ ID NO: 3699 - DNA, 17 bp, Influenza A
atgctgtggcaaatggg

SEQ ID NO: 3700 - DNA, 19 bp, Influenza A
cacatacagcgggataaga

SEQ ID NO: 3701 - DNA, 20 bp, Influenza A
gataaggagtcaatgggttt

SEQ ID NO: 3702 - DNA, 20 bp, Influenza A
accagttcatgtaggagatc

SEQ ID NO: 3703 - DNA, 20 bp, Influenza A
gagatgaagtggttactgtc

SEQ ID NO: 3704 - DNA, 20 bp, Influenza A
atcccggtaaattcacaaat

SEQ ID NO: 3705 - DNA, 19 bp, Influenza A
aaggagtcaatgggtttca

SEQ ID NO: 3706 - DNA, 19 bp, Influenza A
gaaggaaccgatgtatgct

SEQ ID NO: 3707 - DNA, 20 bp, Influenza A
atcaattcctggagtttgaa

SEQ ID NO: 3708 - DNA, 20 bp, Influenza A
aatgaagaatgttcccgaaa

SEQ ID NO: 3709 - DNA, 21 bp, Influenza A
gatcaattcctggagttttcc

SEQ ID NO: 3710 - DNA, 18 bp, Influenza A
gtcaatgtggactgctgg

SEQ ID NO: 3711 - DNA, 18 bp, Influenza A
aacaatcactggaccacc

SEQ ID NO: 3712 - DNA, 24 bp, Influenza A
gaatatcaagaaaatatgtaccca

SEQ ID NO: 3713 - DNA, 26 bp, Influenza A
aatatcaagaaaatatgtattcaagg

SEQ ID NO: 3714 - DNA, 19 bp, Influenza A
aaccagtgcatgtagaaga

SEQ ID NO: 3715 - DNA, 22 bp, Influenza A
gatttaattattgagaggcgag

SEQ ID NO: 3716 - DNA, 15 bp, Influenza A
gggccaccccaatgt

SEQ ID NO: 3717 - DNA, 18 bp, Influenza A
gactgctgggaacaatca

SEQ ID NO: 3718 - DNA, 18 bp, Influenza A
aaatagcagggcagtagg

SEQ ID NO: 3719 - DNA, 21 bp, Influenza A
aatgggactaaagtaaacacg

SEQ ID NO: 3720 - DNA, 18 bp, Influenza A
atgtctgctatcctggga

SEQ ID NO: 3721 - DNA, 19 bp, Influenza A
aggaaacaatgggattcac

SEQ ID NO: 3722 - DNA, 19 bp, Influenza A
aatgggattcacctacagc

SEQ ID NO: 3723 - DNA, 20 bp, Influenza A
agctctaaggcaaattctca

SEQ ID NO: 3724 - DNA, 18 bp, Influenza A
ccgatgtatgctatcccg

SEQ ID NO: 3725 - DNA, 18 bp, Influenza A
aaaatatgccttgggcac

SEQ ID NO: 3726 - DNA, 17 bp, Influenza A
gaggagtggaagtcgtc

SEQ ID NO: 3727 - DNA, 19 bp, Influenza A
cattgaggcagatccttcg

SEQ ID NO: 3728 - DNA, 21 bp, Influenza A
ctagtgcatgtagaagatcag

SEQ ID NO: 3729 - DNA, 21 bp, Influenza A
gccgatttaattattgagagg

SEQ ID NO: 3730 - DNA, 18 bp, Influenza A
caatggagcgacaagtgc

SEQ ID NO: 3731 - DNA, 19 bp, Influenza A
agttcatcactctggatcg

SEQ ID NO: 3732 - DNA, 21 bp, Influenza A
cgatttaattattgagaggcg

SEQ ID NO: 3733 - DNA, 19 bp, Influenza A
agcaatcattcactccaag

SEQ ID NO: 3734 - DNA, 17 bp, Influenza A
cctgggacaatgtggac

SEQ ID NO: 3735 - DNA, 19 bp, Influenza A
ctgggaaccctaataggac

SEQ ID NO: 3736 - DNA, 17 bp, Influenza A
aggcagatccttcgagg

SEQ ID NO: 3737 - DNA, 19 bp, Influenza A
accagtgcatgtagaagat

SEQ ID NO: 3738 - DNA, 19 bp, Influenza A
gcttcacctatagtgggat

SEQ ID NO: 3739 - DNA, 25 bp, Influenza A
aatttaataattgagagaagagaag

SEQ ID NO: 3740 - DNA, 18 bp, Influenza A
gcgagaaggaagtgatgt

SEQ ID NO: 3741 - DNA, 20 bp, Influenza A
ggttactgtcgaattcagac

SEQ ID NO: 3742 - DNA, 21 bp, Influenza A
aaactgcgaatatcaagaaaa

SEQ ID NO: 3743 - DNA, 19 bp, Influenza A
gccaaagatcaggttcttc

SEQ ID NO: 3744 - DNA, 20 bp, Influenza A
aatcactgagacagatcctt

SEQ ID NO: 3745 - DNA, 20 bp, Influenza A
atcaattcctggagttttcc

SEQ ID NO: 3746 - DNA, 18 bp, Influenza A
aaggaaccgatgtatgct

SEQ ID NO: 3747 - DNA, 19 bp, Influenza A
ggacaatgtggactcctag

SEQ ID NO: 3748 - DNA, 19 bp, Influenza A
gcggaataagaactgatgg

SEQ ID NO: 3749 - DNA, 17 bp, Influenza A
ccattggctgatgctga

SEQ ID NO: 3750 - DNA, 18 bp, Influenza A
agtgaatgccacagagac

SEQ ID NO: 3751 - DNA, 18 bp, Influenza A
gagaaggaaccgatgtgt

SEQ ID NO: 3752 - DNA, 18 bp, Influenza A
ctgcacaagatcaggttc

SEQ ID NO: 3753 - DNA, 21 bp, Influenza A
gccgatctaattattgagagg

SEQ ID NO: 3754 - DNA, 19 bp, Influenza A
agacaatgggattcaccta

SEQ ID NO: 3755 - DNA, 19 bp, Influenza A
caaccagttcatgtaggag

SEQ ID NO: 3756 - DNA, 20 bp, Influenza A
aagggaaaagaacagttgac

SEQ ID NO: 3757 - DNA, 19 bp, Influenza A
aaaatctgccttggacatc

SEQ ID NO: 3758 - DNA, 20 bp, Influenza A
ctctaaggcaaattctcaga

SEQ ID NO: 3759 - DNA, 19 bp, Influenza A
atcactgaggcagatcatt

SEQ ID NO: 3760 - DNA, 20 bp, Influenza A
agaattttcagccgacttaa

SEQ ID NO: 3761 - DNA, 17 bp, Influenza A
ggttcacatacagcgga

SEQ ID NO: 3762 - DNA, 17 bp, Influenza A
gggaaaaggccaacaga

SEQ ID NO: 3763 - DNA, 22 bp, Influenza A
gagttttcctctgatttgataa

SEQ ID NO: 3764 - DNA, 20 bp, Influenza A
ctttctatgccgagatgaag

SEQ ID NO: 3765 - DNA, 19 bp, Influenza A
ccgggaaattcacaaatga

SEQ ID NO: 3766 - DNA, 15 bp, Influenza A
atcactgggccaccc

SEQ ID NO: 3767 - DNA, 18 bp, Influenza A
aaggtcaggaggaattgg

SEQ ID NO: 3768 - DNA, 23 bp, Influenza A
gaacaaaagtgaacatattaaca

SEQ ID NO: 3769 - DNA, 17 bp, Influenza A
gaacaaacgtccccagg

SEQ ID NO: 3770 - DNA, 20 bp, Influenza A
aaaatctggaagacctgagg

SEQ ID NO: 3771 - DNA, 19 bp, Influenza A
aaacagagaaacatcccgc

SEQ ID NO: 3772 - DNA, 19 bp, Influenza A
aaacagagaaacattccgc

SEQ ID NO: 3773 - DNA, 20 bp, Influenza A
aaacatcccgcttattgtaa

SEQ ID NO: 3774 - DNA, 20 bp, Influenza A
aaaccctaaatgtgacatcc

SEQ ID NO: 3775 - DNA, 17 bp, Influenza A
aacaatggagctcgtgg

SEQ ID NO: 3776 - DNA, 18 bp, Influenza A
aacagaatgtgccagtca

SEQ ID NO: 3777 - DNA, 20 bp, Influenza A
aacatcccgcttattgtaac

SEQ ID NO: 3778 - DNA, 19 bp, Influenza A
aacattccgcttattgcaa

SEQ ID NO: 3779 - DNA, 18 bp, Influenza A
aaccggtggtcaatcttt

SEQ ID NO: 3780 - DNA, 16 bp, Influenza A
aacgcatcaaccggtg

SEQ ID NO: 3781 - DNA, 17 bp, Influenza A
aacgtgccagtcactca

SEQ ID NO: 3782 - DNA, 25 bp, Influenza A
aagagaataagactatttgactatt

SEQ ID NO: 3783 - DNA, 17 bp, Influenza A
aagcatgcaacgcatca

SEQ ID NO: 3784 - DNA, 18 bp, Influenza A
aagcatgcaatgcatcaa

SEQ ID NO: 3785 - DNA, 21 bp, Influenza A
aataactccacagatacagtg

SEQ ID NO: 3786 - DNA, 24 bp, Influenza A
aataagactatttgactattccag

SEQ ID NO: 3787 - DNA, 20 bp, Influenza A
aatcgaataactccacagac

SEQ ID NO: 3788 - DNA, 20 bp, Influenza A
aatcgaggcagtaatctatg

SEQ ID NO: 3789 - DNA, 21 bp, Influenza A
aatgcatacgataggatatgc

SEQ ID NO: 3790 - DNA, 17 bp, Influenza A
aatgtgactcgctctgg

SEQ ID NO: 3791 - DNA, 17 bp, Influenza A
acaatggagctcgtgga

SEQ ID NO: 3792 - DNA, 19 bp, Influenza A
acactctcacagaacagaa

SEQ ID NO: 3793 - DNA, 18 bp, Influenza A
acaggtggtcaatccttc

SEQ ID NO: 3794 - DNA, 18 bp, Influenza A
acccaaacaatggagctc

SEQ ID NO: 3795 - DNA, 18 bp, Influenza A
actccacagacacagtga

SEQ ID NO: 3796 - DNA, 21 bp, Influenza A
actctcatagaacagaatgtg

SEQ ID NO: 3797 - DNA, 19 bp, Influenza A
actgaggtttgtcttctcc

SEQ ID NO: 3798 - DNA, 17 bp, Influenza A
actgatttaggagcgcc

SEQ ID NO: 3799 - DNA, 18 bp, Influenza A
actgatttaggtgcccca

SEQ ID NO: 3800 - DNA, 23 bp, Influenza A
agaataagactgtttgactattc

SEQ ID NO: 3801 - DNA, 18 bp, Influenza A
agactgcaaaatcgaggc

SEQ ID NO: 3802 - DNA, 19 bp, Influenza A
agagaaacatcccgcttat

SEQ ID NO: 3803 - DNA, 20 bp, Influenza A
agatcgaggcagtaatctat

SEQ ID NO: 3804 - DNA, 17 bp, Influenza A
agctcgtggaaacagag

SEQ ID NO: 3805 - DNA, 16 bp, Influenza A
aggagcgccattggaa

SEQ ID NO: 3806 - DNA, 20 bp, Influenza A
aggcagtaatctatggaaac

SEQ ID NO: 3807 - DNA, 20 bp, Influenza A
aggtggtcaatccttctata

SEQ ID NO: 3808 - DNA, 18 bp, Influenza A
agtcacccaaacaatgga

SEQ ID NO: 3809 - DNA, 20 bp, Influenza A
agtcactcaaacaatggagc

SEQ ID NO: 3810 - DNA, 21 bp, Influenza A
atacgataggatatgcattgg

SEQ ID NO: 3811 - DNA, 18 bp, Influenza A
atagaacagaacgtgcca

SEQ ID NO: 3812 - DNA, 18 bp, Influenza A
atcaacaggtggccaatc

SEQ ID NO: 3813 - DNA, 20 bp, Influenza A
atctaaaggatcaaggttgg

SEQ ID NO: 3814 - DNA, 19 bp, Influenza A
atctggaacgagtaaagca

SEQ ID NO: 3815 - DNA, 17 bp, Influenza A
atgcatcaacaggtggt

SEQ ID NO: 3816 - DNA, 17 bp, Influenza A
atggagctcgtggaaac

SEQ ID NO: 3817 - DNA, 17 bp, Influenza A
atgggaaccccaagtgt

SEQ ID NO: 3818 - DNA, 21 bp, Influenza A
atgtgacatccatctaaaaga

SEQ ID NO: 3819 - DNA, 16 bp, Influenza A
atgtgccagtcaccca

SEQ ID NO: 3820 - DNA, 18 bp, Influenza A
attggaactgcgagactg

SEQ ID NO: 3821 - DNA, 18 bp, Influenza A
atttaggtgccccattgg

SEQ ID NO: 3822 - DNA, 22 bp, Influenza A
caaatgcatacgataggatatg

SEQ ID NO: 3823 - DNA, 23 bp, Influenza A
caagagaataagactatttgact

SEQ ID NO: 3824 - DNA, 20 bp, Influenza A
cacaaatgcatacgatagga

SEQ ID NO: 3825 - DNA, 20 bp, Influenza A
cacagtgaacactctcatag

SEQ ID NO: 3826 - DNA, 19 bp, Influenza A
cacgaatgcatacgatagg

SEQ ID NO: 3827 - DNA, 18 bp, Influenza A
cagaacagaatgtgccag

SEQ ID NO: 3828 - DNA, 20 bp, Influenza A
cagatacagtgaacactctc

SEQ ID NO: 3829 - DNA, 19 bp, Influenza A
caggtggaatgtgactaga

SEQ ID NO: 3830 - DNA, 17 bp, Influenza A
cagtgcggcatcttaca

SEQ ID NO: 3831 - DNA, 19 bp, Influenza A
cagtgctgcatcttacaag

SEQ ID NO: 3832 - DNA, 21 bp, Influenza A
catctaaaagatcaaggttgg

SEQ ID NO: 3833 - DNA, 18 bp, Influenza A
cattggaactgcgagact

SEQ ID NO: 3834 - DNA, 19 bp, Influenza A
ccagaagggatgtgttacc

SEQ ID NO: 3835 - DNA, 16 bp, Influenza A
ccagcaaggcatgcaa

SEQ ID NO: 3836 - DNA, 16 bp, Influenza A
ccagcgcaccagaagg

SEQ ID NO: 3837 - DNA, 19 bp, Influenza A
cccaaatgtgacatccatc

SEQ ID NO: 3838 - DNA, 17 bp, Influenza A
cccaagtgtgacatcca

SEQ ID NO: 3839 - DNA, 16 bp, Influenza A
ccccattggaactgcg

SEQ ID NO: 3840 - DNA, 21 bp, Influenza A
cctggatctgtagaaaatctg

SEQ ID NO: 3841 - DNA, 16 bp, Influenza A
cgcaccagaagggatg

SEQ ID NO: 3842 - DNA, 15 bp, Influenza A
cgcaccagaggggat

SEQ ID NO: 3843 - DNA, 20 bp, Influenza A
cggcatcttacaagagaata

SEQ ID NO: 3844 - DNA, 19 bp, Influenza A
cgtggaaacagagaaacat

SEQ ID NO: 3845 - DNA, 18 bp, Influenza A
ctagctctggaacaagca

SEQ ID NO: 3846 - DNA, 20 bp, Influenza A
ctatggaaaccccaaatgtg

SEQ ID NO: 3847 - DNA, 21 bp, Influenza A
ctatttgactattccaggtgg

SEQ ID NO: 3848 - DNA, 18 bp, Influenza A
ctcaaacaatggagctcg

SEQ ID NO: 3849 - DNA, 18 bp, Influenza A
ctccacagacacagtgaa

SEQ ID NO: 3850 - DNA, 16 bp, Influenza A
ctccagtgcggcatct

SEQ ID NO: 3851 - DNA, 19 bp, Influenza A
ctgaggtttgttttctcca

SEQ ID NO: 3852 - DNA, 18 bp, Influenza A
ctgatttaggtgccccat

SEQ ID NO: 3853 - DNA, 19 bp, Influenza A
ctggaagaactgaggtttg

SEQ ID NO: 3854 - DNA, 22 bp, Influenza A
cttattgcaacactgatttagg

SEQ ID NO: 3855 - DNA, 23 bp, Influenza A
cttattgtaacactgatttaggt

SEQ ID NO: 3856 - DNA, 22 bp, Influenza A
cttctataggagcatcaattgg

SEQ ID NO: 3857 - DNA, 19 bp, Influenza A
gaaacagagaaacatcccg

SEQ ID NO: 3858 - DNA, 21 bp, Influenza A
gaaaccctaaatgtgacatcc

SEQ ID NO: 3859 - DNA, 21 bp, Influenza A
gaacactctcatagaacagaa

SEQ ID NO: 3860 - DNA, 17 bp, Influenza A
gaactgcgagactgcaa

SEQ ID NO: 3861 - DNA, 22 bp, Influenza A
gaatgtaactagatctggaacc

SEQ ID NO: 3862 - DNA, 18 bp, Influenza A
gaatgtaccagtcaccca

SEQ ID NO: 3863 - DNA, 22 bp, Influenza A
gactatttgactattccagatg

SEQ ID NO: 3864 - DNA, 18 bp, Influenza A
gagactgcaagatcgagg

SEQ ID NO: 3865 - DNA, 15 bp, Influenza A
gagaggcccagcgca

SEQ ID NO: 3866 - DNA, 19 bp, Influenza A
gagtaaagcatgcaatgca

SEQ ID NO: 3867 - DNA, 18 bp, Influenza A
gatttaggtgccccattg

SEQ ID NO: 3868 - DNA, 20 bp, Influenza A
gatttgtcttctccaatgcg

SEQ ID NO: 3869 - DNA, 18 bp, Influenza A
gcaaaatcgaggcagtaa

SEQ ID NO: 3870 - DNA, 17 bp, Influenza A
gcaccagagggaatgtg

SEQ ID NO: 3871 - DNA, 20 bp, Influenza A
gcagtaatctatgggaaccc

SEQ ID NO: 3872 - DNA, 17 bp, Influenza A
gcatcaacaggtggtca

SEQ ID NO: 3873 - DNA, 18 bp, Influenza A
gcatcaattggttgacca

SEQ ID NO: 3874 - DNA, 18 bp, Influenza A
gcatgcaatgcatcaaca

SEQ ID NO: 3875 - DNA, 16 bp, Influenza A
gccccattggaactgc

SEQ ID NO: 3876 - DNA, 15 bp, Influenza A
gcctagcgcaccaga

SEQ ID NO: 3877 - DNA, 18 bp, Influenza A
gcgagactgcaagattga

SEQ ID NO: 3878 - DNA, 18 bp, Influenza A
gcgagcacaaatgcatac

SEQ ID NO: 3879 - DNA, 17 bp, Influenza A
gctcgtggaaacagaga

SEQ ID NO: 3880 - DNA, 16 bp, Influenza A
ggaactgcgagactgc

SEQ ID NO: 3881 - DNA, 19 bp, Influenza A
ggaatgtgactagctctgg

SEQ ID NO: 3882 - DNA, 15 bp, Influenza A
ggcccagcgcaccag

SEQ ID NO: 3883 - DNA, 16 bp, Influenza A
ggcgagcacaaatgca

SEQ ID NO: 3884 - DNA, 16 bp, Influenza A
ggtgccccattggaac

SEQ ID NO: 3885 - DNA, 20 bp, Influenza A
gtaccaatcaaacaactcca

SEQ ID NO: 3886 - DNA, 18 bp, Influenza A
gtcacccaaacaatggag

SEQ ID NO: 3887 - DNA, 20 bp, Influenza A
gtgaacactctcatagaaca

SEQ ID NO: 3888 - DNA, 20 bp, Influenza A
ggaagaatcctgaagactga

SEQ ID NO: 3889 - DNA, 20 bp, Influenza A
atggaagaatcctgaagact

SEQ ID NO: 3890 - DNA, 19 bp, Influenza A
ccatggaagaatcctgaag

SEQ ID NO: 3891 - DNA, 21 bp, Influenza A
catggtatggacacattctat

SEQ ID NO: 3892 - DNA, 20 bp, Influenza A
attgcgagtaagatccaatg

SEQ ID NO: 3893 - DNA, 18 bp, Influenza A
gccatggaagaatcctga

SEQ ID NO: 3894 - DNA, 19 bp, Influenza A
gcgagtaagatccaatggg

SEQ ID NO: 3895 - DNA, 22 bp, Influenza A
cagtaaatatgcatttggaaac

SEQ ID NO: 3896 - DNA, 23 bp, Influenza A
aatcctgaagactgatttaaaaa

SEQ ID NO: 3897 - DNA, 21 bp, Influenza A
aagtgtgacaacagaagatat

SEQ ID NO: 3898 - DNA, 19 bp, Influenza A
gtagtgcaatgtcagactg

SEQ ID NO: 3899 - DNA, 23 bp, Influenza A
gacaacagaagatataaatcgaa

SEQ ID NO: 3900 - DNA, 19 bp, Influenza A
cattgcgagtaagatccaa

SEQ ID NO: 3901 - DNA, 21 bp, Influenza A
cctgaagactgatttaaacag

SEQ ID NO: 3902 - DNA, 23 bp, Influenza A
gtgacaacagaagatctaaatag

SEQ ID NO: 3903 - DNA, 19 bp, Influenza A
ccagacattgcgagtaaga

SEQ ID NO: 3904 - DNA, 24 bp, Influenza A
caaatatgttagagttaagagtct

SEQ ID NO: 3905 - DNA, 18 bp, Influenza A
cgtagtgcaatgtcagac

SEQ ID NO: 3906 - DNA, 21 bp, Influenza A
ggagttaagagtctcaaactg

SEQ ID NO: 3907 - DNA, 18 bp, Influenza A
catttggaaactgcccca

SEQ ID NO: 3908 - DNA, 18 bp, Influenza A
caaggcctcttgtcaatg

SEQ ID NO: 3909 - DNA, 23 bp, Influenza A
atatgttagagttaagagtctca

SEQ ID NO: 3910 - DNA, 21 bp, Influenza A
agttaagagtctcaaactggc

SEQ ID NO: 3911 - DNA, 19 bp, Influenza A
gggagaatcctgaagactg

SEQ ID NO: 3912 - DNA, 17 bp, Influenza A
gtgatagggccaaggcc

SEQ ID NO: 3913 - DNA, 19 bp, Influenza A
ccaaagaattgctccacac

SEQ ID NO: 3914 - DNA, 18 bp, Influenza A
cacacagagcacaatggg

SEQ ID NO: 3915 - DNA, 18 bp, Influenza A
gcgtagtgcaatgtcaga

SEQ ID NO: 3916 - DNA, 19 bp, Influenza A
aatcctgaagaccgatttg

SEQ ID NO: 3917 - DNA, 18 bp, Influenza A
accgacacaacaacaagc

SEQ ID NO: 3918 - DNA, 21 bp, Influenza A
atggaagaatcttgaagactg

SEQ ID NO: 3919 - DNA, 17 bp, Influenza A
atgatagggccaaggcc

SEQ ID NO: 3920 - DNA, 20 bp, Influenza A
cagcattcaaatgatcaagg

SEQ ID NO: 3921 - DNA, 20 bp, Influenza A
gatctttccagacacaatct

SEQ ID NO: 3922 - DNA, 21 bp, Influenza A
aatctggaatgtgacttacag

SEQ ID NO: 3923 - DNA, 20 bp, Influenza A
gatcaagtagaggactattt

SEQ ID NO: 3924 - DNA, 19 bp, Influenza A
atggtatggacacgttctt

SEQ ID NO: 3925 - DNA, 21 bp, Influenza A
agatcaagtagaggactattc

SEQ ID NO: 3926 - DNA, 18 bp, Influenza A
gtgacacatgccaaagaa

SEQ ID NO: 3927 - DNA, 19 bp, Influenza A
acacatgccaaagaattgc

SEQ ID NO: 3928 - DNA, 22 bp, Influenza A
atgttcagattcattctacagg

SEQ ID NO: 3929 - DNA, 20 bp, Influenza A
aatccagatctttccagaca

SEQ ID NO: 3930 - DNA, 19 bp, Influenza A
cacatgccaaagaattgct

SEQ ID NO: 3931 - DNA, 21 bp, Influenza A
acaatctggaatgtgacttac

SEQ ID NO: 3932 - DNA, 19 bp, Influenza A
acatgccaaagaattgctc

SEQ ID NO: 3933 - DNA, 22 bp, Influenza A
atgttcagattcattctacaga

SEQ ID NO: 3934 - DNA, 16 bp, Influenza A
gatagggccaaggcct

SEQ ID NO: 3935 - DNA, 19 bp, Influenza A
cttacagtggaacaagcaa

SEQ ID NO: 3936 - DNA, 18 bp, Influenza A
aattgctccacacagagc

SEQ ID NO: 3937 - DNA, 20 bp, Influenza A
ctggaatgtgacttacagtg

SEQ ID NO: 3938 - DNA, 18 bp, Influenza A
agaattgctccacacaga

SEQ ID NO: 3939 - DNA, 20 bp, Influenza A
aagaatccagatctttccag

SEQ ID NO: 3940 - DNA, 18 bp, Influenza A
gaattgctccacacagag

SEQ ID NO: 3941 - DNA, 19 bp, Influenza A
gtgaagagtctcaaactgg

SEQ ID NO: 3942 - DNA, 19 bp, Influenza A
ctatggcaacccttcttgt

SEQ ID NO: 3943 - DNA, 20 bp, Influenza A
gatcaagtagaggactattc

SEQ ID NO: 3944 - DNA, 19 bp, Influenza A
acttacagtggaacaagca

SEQ ID NO: 3945 - DNA, 21 bp, Influenza A
gtaattgtgtagtgcaatgtc

SEQ ID NO: 3946 - DNA, 20 bp, Influenza A
atctggaatgtgacttacac

SEQ ID NO: 3947 - DNA, 21 bp, Influenza A
aagcatgttcagattcattct

SEQ ID NO: 3948 - DNA, 19 bp, Influenza A
atccagatctttccagaca

SEQ ID NO: 3949 - DNA, 21 bp, Influenza A
cttaccaaagaatccagatct

SEQ ID NO: 3950 - DNA, 19 bp, Influenza A
ggtatggacacgttctttc

SEQ ID NO: 3951 - DNA, 21 bp, Influenza A
caatctggaatgtgtcttaca

SEQ ID NO: 3952 - DNA, 21 bp, Influenza A
aatctggaatgtgtcttacag

SEQ ID NO: 3953 - DNA, 21 bp, Influenza A
gaatccagatctttccagata

SEQ ID NO: 3954 - DNA, 19 bp, Influenza A
atcaagtagaggactattc

SEQ ID NO: 3955 - DNA, 19 bp, Influenza A
ccaatcaacaaactccaca

SEQ ID NO: 3956 - DNA, 20 bp, Influenza A
aattgtgtagtgcaatgtca

SEQ ID NO: 3957 - DNA, 17 bp, Influenza A
acacagagcacaatggg

SEQ ID NO: 3958 - DNA, 24 bp, Influenza A
gactattattggtcagtactaaaa

SEQ ID NO: 3959 - DNA, 21 bp, Influenza A
acaatctggaatgtgtcttac

SEQ ID NO: 3960 - DNA, 23 bp, Influenza A
acaacagaagatataaatcgaac

SEQ ID NO: 3961 - DNA, 18 bp, Influenza A
aaaccaggccagacattg

SEQ ID NO: 3962 - DNA, 22 bp, Influenza A
aagaatcttgaagactgatttg

SEQ ID NO: 3963 - DNA, 21 bp, Influenza A
aaagcatgttcagattcattc

SEQ ID NO: 3964 - DNA, 19 bp, Influenza A
ggaatgtgacttacagtgg

SEQ ID NO: 3965 - DNA, 21 bp, Influenza A
ctgggaatgtagaaaacctag

SEQ ID NO: 3966 - DNA, 21 bp, Influenza A
caagcaatgcagataaaatct

SEQ ID NO: 3967 - DNA, 20 bp, Influenza A
cctaccaaagaatccagatc

SEQ ID NO: 3968 - DNA, 22 bp, Influenza A
attattggtcggtactaaaacc

SEQ ID NO: 3969 - DNA, 18 bp, Influenza A
ccttgtcaatggtcagca

SEQ ID NO: 3970 - DNA, 18 bp, Influenza A
atgccaaagaattgctcc

SEQ ID NO: 3971 - DNA, 21 bp, Influenza A
ggaatgtagaaaacctagagg

SEQ ID NO: 3972 - DNA, 19 bp, Influenza A
ctacacacagagcacaatg

SEQ ID NO: 3973 - DNA, 19 bp, Influenza A
agtacattgccattccaca

SEQ ID NO: 3974 - DNA, 20 bp, Influenza A
ctaccaatcaacaaactcca

SEQ ID NO: 3975 - DNA, 27 bp, Influenza A
aatatcactaataactatactactagt

SEQ ID NO: 3976 - DNA, 18 bp, Influenza A
atggtcctacatcgtcga

SEQ ID NO: 3977 - DNA, 19 bp, Influenza A
gataaaatctgcatcggct

SEQ ID NO: 3978 - DNA, 19 bp, Influenza A
cagtcaacaaactccacag

SEQ ID NO: 3979 - DNA, 23 bp, Influenza A
caatatcagtaaatatgcattcg

SEQ ID NO: 3980 - DNA, 19 bp, Influenza A
aaaatctgcatcggctacc

SEQ ID NO: 3981 - DNA, 21 bp, Influenza A
caaagcatgttcagattcatt

SEQ ID NO: 3982 - DNA, 22 bp, Influenza A
aatgtagaaaacctagaggaac

SEQ ID NO: 3983 - DNA, 18 bp, Influenza A
aaccaatgatagggccaa

SEQ ID NO: 3984 - DNA, 20 bp, Influenza A
cgggaatgtagaaaacctag

SEQ ID NO: 3985 - DNA, 17 bp, Influenza A
cgatgatagggccaagg

SEQ ID NO: 3986 - DNA, 20 bp, Influenza A
caatcaacaaactccacaga

SEQ ID NO: 3987 - DNA, 21 bp, Influenza A
aaagaattactccacacagag

SEQ ID NO: 3988 - DNA, 18 bp, Influenza A
gctgtgtgcaacaaatct

SEQ ID NO: 3989 - DNA, 20 bp, Influenza A
ctggaatgtgtcttacagtg

SEQ ID NO: 3990 - DNA, 20 bp, Influenza A
agtaagatccaatgggaacc

SEQ ID NO: 3991 - DNA, 17 bp, Influenza A
actccacacagagcaca

SEQ ID NO: 3992 - DNA, 21 bp, Influenza A
gatttaaacagtggtaactgc

SEQ ID NO: 3993 - DNA, 20 bp, Influenza A
gacattgcgagtaagatcaa

SEQ ID NO: 3994 - DNA, 21 bp, Influenza A
gtgacacataccaaagaattg

SEQ ID NO: 3995 - DNA, 20 bp, Influenza A
gctaccaatcaacaaactcc

SEQ ID NO: 3996 - DNA, 19 bp, Influenza A
cctctcattctagacacct

SEQ ID NO: 3997 - DNA, 23 bp, Influenza A
cagattcattctacagaagtatg

SEQ ID NO: 3998 - DNA, 21 bp, Influenza A
gatctttccagacacaatttg

SEQ ID NO: 3999 - DNA, 23 bp, Influenza A
ctattgaaggactaatctatggc

SEQ ID NO: 4000 - DNA, 22 bp, Influenza A
cactttttagttctgctagttc

SEQ ID NO: 4001 - DNA, 18 bp, Influenza A
ggtcctacatcgtcgaaa

SEQ ID NO: 4002 - DNA, 19 bp, Influenza A
ggatccagatctttccaga

SEQ ID NO: 4003 - DNA, 24 bp, Influenza A
actaatttaaacagtggtaattgc

SEQ ID NO: 4004 - DNA, 18 bp, Influenza A
catgagatggctgactca

SEQ ID NO: 4005 - DNA, 16 bp, Influenza A
gccagacattgcgagt

SEQ ID NO: 4006 - DNA, 19 bp, Influenza A
caagcaaagcatgttcaaa

SEQ ID NO: 4007 - DNA, 20 bp, Influenza A
ggaagaatcttgaagactga

SEQ ID NO: 4008 - DNA, 21 bp, Influenza A
ctagttcctaccaaagaatcc

SEQ ID NO: 4009 - DNA, 18 bp, Influenza A
gggagccatggaagaatc

SEQ ID NO: 4010 - DNA, 21 bp, Influenza A
atgtagaaaacctagaggaac

SEQ ID NO: 4011 - DNA, 18 bp, Influenza A
aaatctgcatcggctacc

SEQ ID NO: 4012 - DNA, 19 bp, Influenza A
gctaccagtcaacaaactc

SEQ ID NO: 4013 - DNA, 22 bp, Influenza A
caatctggaatgtgtcttatag

SEQ ID NO: 4014 - DNA, 29 bp, Influenza A
aatatcactaataactatactactaatat

SEQ ID NO: 4015 - DNA, 20 bp, Influenza A
ctaatctatggcaacccttc

SEQ ID NO: 4016 - DNA, 19 bp, Influenza A
ggaatgtgtcttacagtgg

SEQ ID NO: 4017 - DNA, 21 bp, Influenza A
aaagaattactccacacagaa

SEQ ID NO: 4018 - DNA, 20 bp, Influenza A
aagaattactccacacagag

SEQ ID NO: 4019 - DNA, 18 bp, Influenza A
aagcaaagcatgttcagg

SEQ ID NO: 4020 - DNA, 18 bp, Influenza A
ccagtcaacaaactccac

SEQ ID NO: 4021 - DNA, 22 bp, Influenza A
cattgaaggactaatctatgga

SEQ ID NO: 4022 - DNA, 19 bp, Influenza A
ctccacacagagcataatg

SEQ ID NO: 4023 - DNA, 20 bp, Influenza A
ggtttcagcattcaaatgat

SEQ ID NO: 4024 - DNA, 22 bp, Influenza A
caagcaatgcagataaaatatg

SEQ ID NO: 4025 - DNA, 20 bp, Influenza A
caacccttcttgtgatctac

SEQ ID NO: 4026 - DNA, 19 bp, Influenza A
caaatctgggacatcctct

SEQ ID NO: 4027 - DNA, 19 bp, Influenza A
gaagagtctcaaacttgca

SEQ ID NO: 4028 - DNA, 19 bp, Influenza A
gatctatggcaacccttca

SEQ ID NO: 4029 - DNA, 22 bp, Influenza A
aaatgtagaaaacctagaggag

SEQ ID NO: 4030 - DNA, 20 bp, Influenza A
aatgtgtcttacagtggaac

SEQ ID NO: 4031 - DNA, 20 bp, Influenza A
acattctttcaggagagagc

SEQ ID NO: 4032 - DNA, 21 bp, Influenza A
gacatcctctcattctagaca

SEQ ID NO: 4033 - DNA, 21 bp, Influenza A
attgaaggactgatctatggc

SEQ ID NO: 4034 - DNA, 20 bp, Influenza A
acgctaacagaaaacaatgt

SEQ ID NO: 4035 - DNA, 18 bp, Influenza A
gaatgctgtgtgcaacaa

SEQ ID NO: 4036 - DNA, 20 bp, Influenza A
gctagttcctaccaaagaat

SEQ ID NO: 4037 - DNA, 17 bp, Influenza A
ctgttcaagacgcccaa

SEQ ID NO: 4038 - DNA, 18 bp, Influenza A
cagtcaacaaactccacg

SEQ ID NO: 4039 - DNA, 20 bp, Influenza A
ctctcattctagacacctgt

SEQ ID NO: 4040 - DNA, 18 bp, Influenza A
gtctatggcaacccttct

SEQ ID NO: 4041 - DNA, 19 bp, Influenza A
gaatgtgtcttacagtggg

SEQ ID NO: 4042 - DNA, 20 bp, Influenza A
agatggttgactcaaaagaa

SEQ ID NO: 4043 - DNA, 18 bp, Influenza A
gggaggaagagaatggtc

SEQ ID NO: 4044 - DNA, 21 bp, Influenza A
ctttttagttctgctagttcc

SEQ ID NO: 4045 - DNA, 20 bp, Influenza A
atgtgtcttacagtggaaca

SEQ ID NO: 4046 - DNA, 25 bp, Influenza A
cagtatcactaataactatactact

SEQ ID NO: 4047 - DNA, 21 bp, Influenza A
gatcttcaaaccagtgatagg

SEQ ID NO: 4048 - DNA, 19 bp, Influenza A
aaatctgggacatcctctt

SEQ ID NO: 4049 - DNA, 18 bp, Influenza A
accaatgttcctgtgaca

SEQ ID NO: 4050 - DNA, 20 bp, Influenza A
gacacatgccaaagaattac

SEQ ID NO: 4051 - DNA, 18 bp, Influenza A
ggaggaagagaatggtcc

SEQ ID NO: 4052 - DNA, 19 bp, Influenza A
aaatctgggacatcctctc

SEQ ID NO: 4053 - DNA, 19 bp, Influenza A
atggcaatccttcttgtga

SEQ ID NO: 4054 - DNA, 18 bp, Influenza A
agtcaacaaactccacgg

SEQ ID NO: 4055 - DNA, 22 bp, Influenza A
aaagaacattcttttcatgtgg

SEQ ID NO: 4056 - DNA, 19 bp, Influenza A
cccgggaatgtagaaaacc

SEQ ID NO: 4057 - DNA, 21 bp, Influenza A
atgttcaggttcattctacag

SEQ ID NO: 4058 - DNA, 19 bp, Influenza A
gaattgctccacacagaac

SEQ ID NO: 4059 - DNA, 21 bp, Influenza A
cctcttattctagacacctgt

SEQ ID NO: 4060 - DNA, 19 bp, Influenza A
aaaccaatgttcctgtgac

SEQ ID NO: 4061 - DNA, 21 bp, Influenza A
gtcactttttagttctgctag

SEQ ID NO: 4062 - DNA, 18 bp, Influenza A
cgcccaatacacaaacaa

SEQ ID NO: 4063 - DNA, 19 bp, Influenza A
agatctttccagacacgat

SEQ ID NO: 4064 - DNA, 21 bp, Influenza A
atatgttggagtgaagagtct

SEQ ID NO: 4065 - DNA, 22 bp, Influenza A
ctagttcctaccaaagaattca

SEQ ID NO: 4066 - DNA, 20 bp, Influenza A
cattctagacacctgtacca

SEQ ID NO: 4067 - DNA, 19 bp, Influenza A
ctacatcgtcgaaagacca

SEQ ID NO: 4068 - DNA, 19 bp, Influenza A
gaaaccaatgttcctgtga

SEQ ID NO: 4069 - DNA, 22 bp, Influenza A
atcaaagaatccagatcttttc

SEQ ID NO: 4070 - DNA, 20 bp, Influenza A
attctagacacctgtaccat

SEQ ID NO: 4071 - DNA, 21 bp, Influenza A
catcagtaaatatgcattcgg

SEQ ID NO: 4072 - DNA, 20 bp, Influenza A
acatcctctcattctagaca

SEQ ID NO: 4073 - DNA, 19 bp, Influenza A
ctcattctagacacctgca

SEQ ID NO: 4074 - DNA, 19 bp, Influenza A
cattctagacacctgcact

SEQ ID NO: 4075 - DNA, 18 bp, Influenza A
caacaaactccacggaaa

SEQ ID NO: 4076 - DNA, 19 bp, Influenza A
ctcttgtcaatggtcaaca

SEQ ID NO: 4077 - DNA, 21 bp, Influenza A
ctctagttcctaccaaagaat

SEQ ID NO: 4078 - DNA, 21 bp, Influenza A
ctgttaatggaatgtgttacc

SEQ ID NO: 4079 - DNA, 20 bp, Influenza A
cgaagaatccagatctttcc

SEQ ID NO: 4080 - DNA, 22 bp, Influenza A
attttttagttctgctagttcc

SEQ ID NO: 4081 - DNA, 18 bp, Influenza A
atctatggcaacccttcc

SEQ ID NO: 4082 - DNA, 18 bp, Influenza A
aatggaatgctgtgtgca

SEQ ID NO: 4083 - DNA, 21 bp, Influenza A
gctgttaatggaatgtgttac

SEQ ID NO: 4084 - DNA, 18 bp, Influenza A
cagtcggtctgaggaatg

SEQ ID NO: 4085 - DNA, 19 bp, Influenza A
actaatctatggcaaccct

SEQ ID NO: 4086 - DNA, 18 bp, Influenza A
ctaaggaatgtgcctgct

SEQ ID NO: 4087 - DNA, 18 bp, Influenza A
acaaactccacggaaact

SEQ ID NO: 4088 - DNA, 19 bp, Influenza A
aagccatggaagaatcttg

SEQ ID NO: 4089 - DNA, 18 bp, Influenza A
cagatctttccagacgca

SEQ ID NO: 4090 - DNA, 21 bp, Influenza A
agattcattctacagaagcat

SEQ ID NO: 4091 - DNA, 19 bp, Influenza A
accctgggaatgtagaaaa

SEQ ID NO: 4092 - DNA, 21 bp, Influenza A
ctcattctagacacctgtact

SEQ ID NO: 4093 - DNA, 20 bp, Influenza A
gactaatctatggcaaccct

SEQ ID NO: 4094 - DNA, 19 bp, Influenza A
ctctgctagttcctaccaa

SEQ ID NO: 4095 - DNA, 19 bp, Influenza A
agcaagcaatgcagataaa

SEQ ID NO: 4096 - DNA, 20 bp, Influenza A
aaaaagccatggaagaatct

SEQ ID NO: 4097 - DNA, 21 bp, Influenza A
atagtacaatgtcagactgag

SEQ ID NO: 4098 - DNA, 22 bp, Influenza A
aagcaatgcagataaaatatgc

SEQ ID NO: 4099 - DNA, 20 bp, Influenza A
gaaaaagccatggaagaatc

SEQ ID NO: 4100 - DNA, 18 bp, Influenza A
caacaaactccaccgaaa

SEQ ID NO: 4101 - DNA, 19 bp, Influenza A
cctgggaatgtagaaaacc

SEQ ID NO: 4102 - DNA, 18 bp, Influenza A
caagcaaagcatgttcga

SEQ ID NO: 4103 - DNA, 22 bp, Influenza A
agatctttccagatacaatctg

SEQ ID NO: 4104 - DNA, 16 bp, Influenza A
aagtagaggactattt

SEQ ID NO: 4105 - DNA, 19 bp, Influenza A
gatctttccagacacgatc

SEQ ID NO: 4106 - DNA, 19 bp, Influenza A
gaaggactgatctatggca

SEQ ID NO: 4107 - DNA, 19 bp, Influenza A
agccatggaagaatcttga

SEQ ID NO: 4108 - DNA, 20 bp, Influenza A
gatacaacaacaagtgtgac

SEQ ID NO: 4109 - DNA, 19 bp, Influenza A
cgctagttcctaccaaaga

SEQ ID NO: 4110 - DNA, 23 bp, Influenza A
agatctaaataggatcttcaaac

SEQ ID NO: 4111 - DNA, 19 bp, Influenza A
ctggaatgtgtcttacagc

SEQ ID NO: 4112 - DNA, 17 bp, Influenza A
aacgtgcctgctagatc

SEQ ID NO: 4113 - DNA, 19 bp, Influenza A
gccaaagaattactccaca

SEQ ID NO: 4114 - DNA, 20 bp, Influenza A
cacataccaaagaattgctc

SEQ ID NO: 4115 - DNA, 21 bp, Influenza A
acaacagaagatataaaccgg

SEQ ID NO: 4116 - DNA, 18 bp, Influenza A
acatcgtcgaaagaccat

SEQ ID NO: 4117 - DNA, 21 bp, Influenza A
cggaaatgtagaaaacctaga

SEQ ID NO: 4118 - DNA, 20 bp, Influenza A
gacacataccaaagaattgc

SEQ ID NO: 4119 - DNA, 20 bp, Influenza A
atcctctcattctagacaca

SEQ ID NO: 4120 - DNA, 22 bp, Influenza A
ctagttcataccaaagaatcca

SEQ ID NO: 4121 - DNA, 18 bp, Influenza A
aacaacaagcgtgacaac

SEQ ID NO: 4122 - DNA, 20 bp, Influenza A
acaaattccacagaaactgt

SEQ ID NO: 4123 - DNA, 17 bp, Influenza A
ggatgctgtgtgcaaca

SEQ ID NO: 4124 - DNA, 19 bp, Influenza A
ctgggacatcctctcattc

SEQ ID NO: 4125 - DNA, 19 bp, Influenza A
gctaaagaattgctccaca

SEQ ID NO: 4126 - DNA, 21 bp, Influenza A
gatacaatctggaatgtgact

SEQ ID NO: 4127 - DNA, 23 bp, Influenza A
aacagaagacataaataggatct

SEQ ID NO: 4128 - DNA, 19 bp, Influenza A
gacttacagtggaacaagc

SEQ ID NO: 4129 - DNA, 19 bp, Influenza A
cctgtaccattgaaggact

SEQ ID NO: 4130 - DNA, 18 bp, Influenza A
cgaagaattgctccacac

SEQ ID NO: 4131 - DNA, 19 bp, Influenza A
agtatgcatttgggaactg

SEQ ID NO: 4132 - DNA, 18 bp, Influenza A
aatgatcaaggggttgga

SEQ ID NO: 4133 - DNA, 22 bp, Influenza A
gacatcctcttattctagacac

SEQ ID NO: 4134 - DNA, 18 bp, Influenza A
ccgtggtatggacacatt

SEQ ID NO: 4135 - DNA, 21 bp, Influenza A
aatatatggcaacccttcttg

SEQ ID NO: 4136 - DNA, 18 bp, Influenza A
atcggctaccaatcaaca

SEQ ID NO: 4137 - DNA, 18 bp, Influenza A
acccttcttgtgatctgc

SEQ ID NO: 4138 - DNA, 19 bp, Influenza A
caaaatctgcatcggctat

SEQ ID NO: 4139 - DNA, 19 bp, Influenza A
atgttggagtgaagagtct

SEQ ID NO: 4140 - DNA, 18 bp, Influenza A
gtcggtctgaggaatgta

SEQ ID NO: 4141 - DNA, 19 bp, Influenza A
aatctgggacatcctctca

SEQ ID NO: 4142 - DNA, 20 bp, Influenza A
gaatgtgacttacagtggaa

SEQ ID NO: 4143 - DNA, 18 bp, Influenza A
catcggctaccaatcaac

SEQ ID NO: 4144 - DNA, 19 bp, Influenza A
acacctgtaccattgaagg

SEQ ID NO: 4145 - DNA, 21 bp, Influenza A
gaaaacctagaggaactaagg

SEQ ID NO: 4146 - DNA, 18 bp, Influenza A
ggaccttcaaaccagtga

SEQ ID NO: 4147 - DNA, 18 bp, Influenza A
aagcaaagcatgttcgaa

SEQ ID NO: 4148 - DNA, 19 bp, Influenza A
ctgcagggaagaattgatt

SEQ ID NO: 4149 - DNA, 20 bp, Influenza A
gtgacttacagtggaacaag

SEQ ID NO: 4150 - DNA, 23 bp, Influenza A
ctgatttaaacattggtaattgc

SEQ ID NO: 4151 - DNA, 21 bp, Influenza A
ggaatgtagagaacctagaag

SEQ ID NO: 4152 - DNA, 21 bp, Influenza A
gggacatcctcttattctaga

SEQ ID NO: 4153 - DNA, 18 bp, Influenza A
atgcatttggaacctgcc

SEQ ID NO: 4154 - DNA, 20 bp, Influenza A
atggttgactcaaaagaaca

SEQ ID NO: 4155 - DNA, 19 bp, Influenza A
gcaaagcatgttcaaactc

SEQ ID NO: 4156 - DNA, 17 bp, Influenza A
aactgctccacacagag

SEQ ID NO: 4157 - DNA, 18 bp, Influenza A
acacatgccaaagaactg

SEQ ID NO: 4158 - DNA, 20 bp, Influenza A
caaaggatccagatctttcc

SEQ ID NO: 4159 - DNA, 19 bp, Influenza A
catcggctgttaatggaat

SEQ ID NO: 4160 - DNA, 18 bp, Influenza A
aggaagccatggaagaat

SEQ ID NO: 4161 - DNA, 21 bp, Influenza A
gtaccattgaaggactaatct

SEQ ID NO: 4162 - DNA, 20 bp, Influenza A
ggtttcagcattcaaatgac

SEQ ID NO: 4163 - DNA, 18 bp, Influenza A
caacgttcctgtgacaca

SEQ ID NO: 4164 - DNA, 21 bp, Influenza A
cttattctagacacctgtacc

SEQ ID NO: 4165 - DNA, 22 bp, Influenza A
cattctagacacctgtactatt

SEQ ID NO: 4166 - DNA, 19 bp, Influenza A
aatccagatctttccggac

SEQ ID NO: 4167 - DNA, 20 bp, Influenza A
agaaaatggtcctacatcgt

SEQ ID NO: 4168 - DNA, 21 bp, Influenza A
agttcataccaaagaatccag

SEQ ID NO: 4169 - DNA, 21 bp, Influenza A
ggaaaacctagaggaactaag

SEQ ID NO: 4170 - DNA, 22 bp, Influenza A
cattctagacacctgtactatc

SEQ ID NO: 4171 - DNA, 19 bp, Influenza A
aagcatgttcaggttcatt

SEQ ID NO: 4172 - DNA, 20 bp, Influenza A
caacgaatccagatctttcc

SEQ ID NO: 4173 - DNA, 19 bp, Influenza A
cccgggaatgtagaaaatc

SEQ ID NO: 4174 - DNA, 21 bp, Influenza A
caacagaagatataaaccgga

SEQ ID NO: 4175 - DNA, 23 bp, Influenza A
gaattcattctacagaagtatga

SEQ ID NO: 4176 - DNA, 21 bp, Influenza A
ctgttaatggattgtgttacc

SEQ ID NO: 4177 - DNA, 19 bp, Influenza A
atcggctgttaatggaatg

SEQ ID NO: 4178 - DNA, 19 bp, Influenza A
ggctgttaatggaatgtgt

SEQ ID NO: 4179 - DNA, 20 bp, Influenza A
caagtatgcatttgggaact

SEQ ID NO: 4180 - DNA, 21 bp, Influenza A
ctgtaccattgaaggactaat

SEQ ID NO: 4181 - DNA, 20 bp, Influenza A
aacccttcttgtgatctact

SEQ ID NO: 4182 - DNA, 19 bp, Influenza A
atcctagacacctgtacca

SEQ ID NO: 4183 - DNA, 18 bp, Influenza A
atctgggacatcctctca

SEQ ID NO: 4184 - DNA, 21 bp, Influenza A
agcaatcaatgcagataaaat

SEQ ID NO: 4185 - DNA, 22 bp, Influenza A
agaactaaggtcactttttagc

SEQ ID NO: 4186 - DNA, 18 bp, Influenza A
caacccttcttgtgacct

SEQ ID NO: 4187 - DNA, 18 bp, Influenza A
atgatcaaggggttggaa

SEQ ID NO: 4188 - DNA, 18 bp, Influenza A
atcgtcgaaagaccatcg

SEQ ID NO: 4189 - DNA, 18 bp, Influenza A
cagcaagcaatgcagata

SEQ ID NO: 4190 - DNA, 18 bp, Influenza A
aaagagttgctccacaca

SEQ ID NO: 4191 - DNA, 21 bp, Influenza A
aatgcatgttcagattcattc

SEQ ID NO: 4192 - DNA, 18 bp, Influenza A
gtcgaaagatcatcggct

SEQ ID NO: 4193 - DNA, 20 bp, Influenza A
cgatctggaatgtgtcttac

SEQ ID NO: 4194 - DNA, 18 bp, Influenza A
atgtccctgtgacacatg

SEQ ID NO: 4195 - DNA, 18 bp, Influenza A
aagaccatcggctgttaa

SEQ ID NO: 4196 - DNA, 20 bp, Influenza A
ctgggacatcctcttattct

SEQ ID NO: 4197 - DNA, 20 bp, Influenza A
acccttcttgtgatctactg

SEQ ID NO: 4198 - DNA, 20 bp, Influenza A
gatactgcacagacaaatct

SEQ ID NO: 4199 - DNA, 19 bp, Influenza A
ccaaagaattgcttcacac

SEQ ID NO: 4200 - DNA, 19 bp, Influenza A
acattcttttcgtgtgggg

SEQ ID NO: 4201 - DNA, 19 bp, Influenza A
aaaacaatgtccctgtgac

SEQ ID NO: 4202 - DNA, 19 bp, Influenza A
gtcggtactaaaaccaggc

SEQ ID NO: 4203 - DNA, 18 bp, Influenza A
aagagttgctccacacag

SEQ ID NO: 4204 - DNA, 21 bp, Influenza A
ggacatcctcttattctagac

SEQ ID NO: 4205 - DNA, 19 bp, Influenza A
aaagcatgttcaggttcat

SEQ ID NO: 4206 - DNA, 18 bp, Influenza A
caaagaactgctccacac

SEQ ID NO: 4207 - DNA, 19 bp, Influenza A
atggttgactcaaaagagc

SEQ ID NO: 4208 - DNA, 22 bp, Influenza A
aaaacctagaggaactaagaac

SEQ ID NO: 4209 - DNA, 19 bp, Influenza A
gtcagactgagaaaggtgg

SEQ ID NO: 4210 - DNA, 19 bp, Influenza A
gtgcaacaaatctaggaca

SEQ ID NO: 4211 - DNA, 18 bp, Influenza A
acacatgccaaagagttg

SEQ ID NO: 4212 - DNA, 20 bp, Influenza A
ctctgctagttcttaccaaa

SEQ ID NO: 4213 - DNA, 18 bp, Influenza A
cagtgggacaagcaaagc

SEQ ID NO: 4214 - DNA, 22 bp, Influenza A
ctaaggtcactttttagttctg

SEQ ID NO: 4215 - DNA, 22 bp, Influenza A
caaatcatgttcagattcattc

SEQ ID NO: 4216 - DNA, 20 bp, Influenza A
gctagttcgtaccaaagaat

SEQ ID NO: 4217 - DNA, 19 bp, Influenza A
aaaccaggtcaaacattgc

SEQ ID NO: 4218 - DNA, 19 bp, Influenza A
cagacacaacctggaatgt

SEQ ID NO: 4219 - DNA, 19 bp, Influenza A
ggtatggacacatcctttc

SEQ ID NO: 4220 - DNA, 20 bp, Influenza A
aatgtagaaaacctagggga

SEQ ID NO: 4221 - DNA, 20 bp, Influenza A
gaatggtcctatatcgtcga

SEQ ID NO: 4222 - DNA, 20 bp, Influenza A
gtctgcagggaagaattaat

SEQ ID NO: 4223 - DNA, 18 bp, Influenza A
cgtcgaaagatcatcggc

SEQ ID NO: 4224 - DNA, 20 bp, Influenza A
cggcttaaacagtacattgc

SEQ ID NO: 4225 - DNA, 20 bp, Influenza A
aaacctagaggaactaagga

SEQ ID NO: 4226 - DNA, 21 bp, Influenza A
ggttcattctacaggagtatg

SEQ ID NO: 4227 - DNA, 19 bp, Influenza A
aaaagaacaacgcttaccc

SEQ ID NO: 4228 - DNA, 21 bp, Influenza A
atgttggagtaaaaagtctca

SEQ ID NO: 4229 - DNA, 19 bp, Influenza A
gcagttggtctaaggaatg

SEQ ID NO: 4230 - DNA, 19 bp, Influenza A
gtactaaaaccaggccaga

SEQ ID NO: 4231 - DNA, 19 bp, Influenza A
ggaaggaagagaatggtcc

SEQ ID NO: 4232 - DNA, 18 bp, Influenza A
ctagacacctgcaccatt

SEQ ID NO: 4233 - DNA, 21 bp, Influenza A
gctgttaatggattgtgttac

SEQ ID NO: 4234 - DNA, 19 bp, Influenza A
gatggctgactcaaaagaa

SEQ ID NO: 4235 - DNA, 19 bp, Influenza A
acaatgggatgctatgtgc

SEQ ID NO: 4236 - DNA, 18 bp, Influenza A
aaacccttcttgtgacct

SEQ ID NO: 4237 - DNA, 19 bp, Influenza A
actgagaaaggtggcttaa

SEQ ID NO: 4238 - DNA, 21 bp, Influenza A
ctttagttctgctagttccta

SEQ ID NO: 4239 - DNA, 20 bp, Influenza A
aaacctgtaccattgaagga

SEQ ID NO: 4240 - DNA, 21 bp, Influenza A
ataaaatatgcatcggctacc

SEQ ID NO: 4241 - DNA, 18 bp, Influenza A
cagactgagaaaggtggc

SEQ ID NO: 4242 - DNA, 17 bp, Influenza A
gtgacacatgccaagga

SEQ ID NO: 4243 - DNA, 17 bp, Influenza A
gtcgaaagaccatcggc

SEQ ID NO: 4244 - DNA, 19 bp, Influenza A
acgctaacagaaaccaatg

SEQ ID NO: 4245 - DNA, 18 bp, Influenza A
gcacaatgggatgctatg

SEQ ID NO: 4246 - DNA, 22 bp, Influenza A
ctagtagtaacagtaagcaatg

SEQ ID NO: 4247 - DNA, 20 bp, Influenza A
gtctgcagggaagaattaac

SEQ ID NO: 4248 - DNA, 22 bp, Influenza A
actagtagtaacagtaagcaat

SEQ ID NO: 4249 - DNA, 18 bp, Influenza A
caaagagttgctccacac

SEQ ID NO: 4250 - DNA, 19 bp, Influenza A
cttcaaaccggtgataggg

SEQ ID NO: 4251 - DNA, 17 bp, Influenza A
aatctgcatcggctacc

SEQ ID NO: 4252 - DNA, 17 bp, Influenza A
ggtctgaggaatgtgcc

SEQ ID NO: 4253 - DNA, 19 bp, Influenza A
agaacaacgcttaccctac

SEQ ID NO: 4254 - DNA, 20 bp, Influenza A
gtaacagtaagcaatgcaga

SEQ ID NO: 4255 - DNA, 18 bp, Influenza A
gagggagagaatggtcct

SEQ ID NO: 4256 - DNA, 17 bp, Influenza A
gaaagaccatcggctgt

SEQ ID NO: 4257 - DNA, 22 bp, Influenza A
cagaaaataatgttcctgtgac

SEQ ID NO: 4258 - DNA, 20 bp, Influenza A
agtaacagtaagcaatgcag

SEQ ID NO: 4259 - DNA, 20 bp, Influenza A
agatggttgactcaaaagga

SEQ ID NO: 4260 - DNA, 20 bp, Influenza A
ggtcactttttagttctgct

SEQ ID NO: 4261 - DNA, 19 bp, Influenza A
cagaaaacaatgtccctgt

SEQ ID NO: 4262 - DNA, 17 bp, Influenza A
gctgtgtgcaacaagtc

SEQ ID NO: 4263 - DNA, 19 bp, Influenza A
aatgtgtcttacagtggga

SEQ ID NO: 4264 - DNA, 18 bp, Influenza A
agacacaatctggaacgt

SEQ ID NO: 4265 - DNA, 18 bp, Influenza A
atgggatgctatgtgcaa

SEQ ID NO: 4266 - DNA, 21 bp, Influenza A
ctggaatgtgtcttacaatgg

SEQ ID NO: 4267 - DNA, 19 bp, Influenza A
gcagagcatgttcagattc

SEQ ID NO: 4268 - DNA, 18 bp, Influenza A
gctgggaggaagagaatg

SEQ ID NO: 4269 - DNA, 18 bp, Influenza A
gcaccattgaaggactga

SEQ ID NO: 4270 - DNA, 21 bp, Influenza A
cttcttgtgatctactgttgg

SEQ ID NO: 4271 - DNA, 20 bp, Influenza A
agaacattctcttcatgtgg

SEQ ID NO: 4272 - DNA, 20 bp, Influenza A
ccttcttgtgatctactgtt

SEQ ID NO: 4273 - DNA, 20 bp, Influenza A
cctgtactattgaaggactg

SEQ ID NO: 4274 - DNA, 17 bp, Influenza A
gcacaatgggatgctgt

SEQ ID NO: 4275 - DNA, 18 bp, Influenza A
actaaaaccaggccagac

SEQ ID NO: 4276 - DNA, 19 bp, Influenza A
gtaccattgaaggactgct

SEQ ID NO: 4277 - DNA, 18 bp, Influenza A
aagcagagcatgttcaga

SEQ ID NO: 4278 - DNA, 20 bp, Influenza A
gtactaaaaccaggtcagac

SEQ ID NO: 4279 - DNA, 20 bp, Influenza A
atatcgtcgaaagaccatcg

SEQ ID NO: 4280 - DNA, 21 bp, Influenza A
aagtaaagcatgttcagattc

SEQ ID NO: 4281 - DNA, 19 bp, Influenza A
catcggctgttaatggatt

SEQ ID NO: 4282 - DNA, 21 bp, Influenza A
ctagaagaactaaggtcactt

SEQ ID NO: 4283 - DNA, 17 bp, Influenza A
atttggaaactgcccca

SEQ ID NO: 4284 - DNA, 18 bp, Influenza A
ggatgctatgtgcaacaa

SEQ ID NO: 4285 - DNA, 20 bp, Influenza A
caggttcattctacaggagt

SEQ ID NO: 4286 - DNA, 19 bp, Influenza A
gcaatccttcttgtgatcc

SEQ ID NO: 4287 - DNA, 19 bp, Influenza A
gaaactgttgacacgctaa

SEQ ID NO: 4288 - DNA, 20 bp, Influenza A
aaagaggaggtaaccaatgc

SEQ ID NO: 4289 - DNA, 19 bp, Influenza A
aaatgaaggagcactgagg

SEQ ID NO: 4290 - DNA, 22 bp, Influenza A
aaatggaggagatagtttctat

SEQ ID NO: 4291 - DNA, 18 bp, Influenza A
aaccattgtgaagaccct

SEQ ID NO: 4292 - DNA, 18 bp, Influenza A
aacttccctcagaccacg

SEQ ID NO: 4293 - DNA, 19 bp, Influenza A
aactttgttccggttgttg

SEQ ID NO: 4294 - DNA, 18 bp, Influenza A
aagacccttacgaacgag

SEQ ID NO: 4295 - DNA, 19 bp, Influenza A
aagcattgaggcagaaaat

SEQ ID NO: 4296 - DNA, 17 bp, Influenza A
aaggcctcaggtcaatg

SEQ ID NO: 4297 - DNA, 24 bp, Influenza A
aataaattgtgtatgaaaggaaga

SEQ ID NO: 4298 - DNA, 18 bp, Influenza A
aatacggacacagctgaa

SEQ ID NO: 4299 - DNA, 20 bp, Influenza A
aatggaaagtggaggaatca

SEQ ID NO: 4300 - DNA, 17 bp, Influenza A
aattgcgctccttggag

SEQ ID NO: 4301 - DNA, 20 bp, Influenza A
acaaatgaacaagaggaagt

SEQ ID NO: 4302 - DNA, 18 bp, Influenza A
acactagtacaaccaggc

SEQ ID NO: 4303 - DNA, 22 bp, Influenza A
acacttatagaaatacggacac

SEQ ID NO: 4304 - DNA, 21 bp, Influenza A
acagctgaacatctcataata

SEQ ID NO: 4305 - DNA, 17 bp, Influenza A
accagcttgtgatctgc

SEQ ID NO: 4306 - DNA, 18 bp, Influenza A
acgaacgagaaagaggag

SEQ ID NO: 4307 - DNA, 18 bp, Influenza A
agaatgccattgcctact

SEQ ID NO: 4308 - DNA, 23 bp, Influenza A
agagaaaattctattgcttactg

SEQ ID NO: 4309 - DNA, 20 bp, Influenza A
agatgggagactttgataga

SEQ ID NO: 4310 - DNA, 18 bp, Influenza A
agcaaaacaagtactggc

SEQ ID NO: 4311 - DNA, 17 bp, Influenza A
agcaagatgagcactgg

SEQ ID NO: 4312 - DNA, 18 bp, Influenza A
agcactgaggcagaaaat

SEQ ID NO: 4313 - DNA, 18 bp, Influenza A
agcgtccgtaaatgaaga

SEQ ID NO: 4314 - DNA, 19 bp, Influenza A
agcttttatgcagagctca

SEQ ID NO: 4315 - DNA, 18 bp, Influenza A
aggacttgggcaattgtc

SEQ ID NO: 4316 - DNA, 21 bp, Influenza A
aggagatagtttctatgcaga

SEQ ID NO: 4317 - DNA, 19 bp, Influenza A
agggcttgacaaaatctgt

SEQ ID NO: 4318 - DNA, 18 bp, Influenza A
aggggcaaccataaatga

SEQ ID NO: 4319 - DNA, 19 bp, Influenza A
agtactggcttcgcttatg

SEQ ID NO: 4320 - DNA, 18 bp, Influenza A
agtggaaagcaaaaccct

SEQ ID NO: 4321 - DNA, 21 bp, Influenza A
atagtttctatgcagaggtca

SEQ ID NO: 4322 - DNA, 17 bp, Influenza A
atcaactcggctggaac

SEQ ID NO: 4323 - DNA, 18 bp, Influenza A
atcaattcggctggaacc

SEQ ID NO: 4324 - DNA, 20 bp, Influenza A
atcgtgaaaacccttacaaa

SEQ ID NO: 4325 - DNA, 19 bp, Influenza A
atcttactgggacatggga

SEQ ID NO: 4326 - DNA, 21 bp, Influenza A
atgaaaggaagaagctacaag

SEQ ID NO: 4327 - DNA, 19 bp, Influenza A
atgcatgagaaatggagga

SEQ ID NO: 4328 - DNA, 19 bp, Influenza A
atggagagtggaggaatca

SEQ ID NO: 4329 - DNA, 22 bp, Influenza A
atggaggaaatagcttttatgc

SEQ ID NO: 4330 - DNA, 18 bp, Influenza A
attgagcgagagaatgcc

SEQ ID NO: 4331 - DNA, 18 bp, Influenza A
caaaaccctggacagact

SEQ ID NO: 4332 - DNA, 21 bp, Influenza A
caaagacttaggtaattgcca

SEQ ID NO: 4333 - DNA, 18 bp, Influenza A
caaccaggcgataacatc

SEQ ID NO: 4334 - DNA, 23 bp, Influenza A
caagagaagaatgatctatatgg

SEQ ID NO: 4335 - DNA, 21 bp, Influenza A
caagtggctagtatcaaaaag

SEQ ID NO: 4336 - DNA, 18 bp, Influenza A
cacccggtaggaatgttg

SEQ ID NO: 4337 - DNA, 20 bp, Influenza A
cagaaaataatggagagcgg

SEQ ID NO: 4338 - DNA, 20 bp, Influenza A
cagaccacgaacacttatag

SEQ ID NO: 4339 - DNA, 19 bp, Influenza A
cagtgaaaggtcttgacag

SEQ ID NO: 4340 - DNA, 21 bp, Influenza A
catcattgtaaagacccttac

SEQ ID NO: 4341 - DNA, 17 bp, Influenza A
catgcagtccccaatgg

SEQ ID NO: 4342 - DNA, 16 bp, Influenza A
catgcggttgccaatg

SEQ ID NO: 4343 - DNA, 18 bp, Influenza A
cattgcccactgttatcc

SEQ ID NO: 4344 - DNA, 21 bp, Influenza A
cattgtctatatcagttggga

SEQ ID NO: 4345 - DNA, 18 bp, Influenza A
ccatcacccttctagcac

SEQ ID NO: 4346 - DNA, 17 bp, Influenza A
ccatcacctcagctggg

SEQ ID NO: 4347 - DNA, 20 bp, Influenza A
cccttacaaatgtacaggaa

SEQ ID NO: 4348 - DNA, 15 bp, Influenza A
ccggttgttggggca

SEQ ID NO: 4349 - DNA, 16 bp, Influenza A
cctgcaccttaccggg

SEQ ID NO: 4350 - DNA, 17 bp, Influenza A
cggagggatcagcaaaa

SEQ ID NO: 4351 - DNA, 19 bp, Influenza A
cggtagagagcacaaattt

SEQ ID NO: 4352 - DNA, 19 bp, Influenza A
ctctttggagcagtgaatg

SEQ ID NO: 4353 - DNA, 17 bp, Influenza A
ctgtttgtgatccgcac

SEQ ID NO: 4354 - DNA, 16 bp, Influenza A
cttgaccgggacctgg

SEQ ID NO: 4355 - DNA, 20 bp, Influenza A
gaaacagtggagagtacaag

SEQ ID NO: 4356 - DNA, 21 bp, Influenza A
gaacaaccataaatgaaggag

SEQ ID NO: 4357 - DNA, 21 bp, Influenza A
gaagacccttacaaatgaaca

SEQ ID NO: 4358 - DNA, 19 bp, Influenza A
gaagctacaaggacttggg

SEQ ID NO: 4359 - DNA, 17 bp, Influenza A
gaccactaaggcatgca

SEQ ID NO: 4360 - DNA, 17 bp, Influenza A
gagaatgccattgccca

SEQ ID NO: 4361 - DNA, 17 bp, Influenza A
gagcactggcttcactt

SEQ ID NO: 4362 - DNA, 19 bp, Influenza A
gagttccacttaccagaac

SEQ ID NO: 4363 - DNA, 22 bp, Influenza A
gataacatcaccttcttacaca

SEQ ID NO: 4364 - DNA, 19 bp, Influenza A
gataggaacaccagcttgt

SEQ ID NO: 4365 - DNA, 16 bp, Influenza A
gatccgcacttgaccg

SEQ ID NO: 4366 - DNA, 16 bp, Influenza A
gcaattgtcacccggt

SEQ ID NO: 4367 - DNA, 21 bp, Influenza A
gcagaaaataatggagagtgg

SEQ ID NO: 4368 - DNA, 16 bp, Influenza A
gcagagctcaagtggc

SEQ ID NO: 4369 - DNA, 18 bp, Influenza A
gcagtgaatggtcttgac

SEQ ID NO: 4370 - DNA, 16 bp, Influenza A
gcagtgagagggcttg

SEQ ID NO: 4371 - DNA, 19 bp, Influenza A
gcatgagaaatggaggaaa

SEQ ID NO: 4372 - DNA, 19 bp, Influenza A
gctctgaggcagaaaataa

SEQ ID NO: 4373 - DNA, 18 bp, Influenza A
gctggaaccactaaagca

SEQ ID NO: 4374 - DNA, 19 bp, Influenza A
gcttcacttatgggtcttc

SEQ ID NO: 4375 - DNA, 16 bp, Influenza A
gcttgtgacctgcacc

SEQ ID NO: 4376 - DNA, 20 bp, Influenza A
ggacagactatgcatgaaag

SEQ ID NO: 4377 - DNA, 18 bp, Influenza A
ggacatgggacactctca

SEQ ID NO: 4378 - DNA, 17 bp, Influenza A
ggacctgggacactctc

SEQ ID NO: 4379 - DNA, 19 bp, Influenza A
ggaggaatcagcaaaacaa

SEQ ID NO: 4380 - DNA, 19 bp, Influenza A
ggaggaatcagcaagatga

SEQ ID NO: 4381 - DNA, 21 bp, Influenza A
ggcagaaaataatggaaagtg

SEQ ID NO: 4382 - DNA, 18 bp, Influenza A
ggctggaaccactaaagc

SEQ ID NO: 4383 - DNA, 20 bp, Influenza A
gggaagaagctataaggatc

SEQ ID NO: 4384 - DNA, 16 bp, Influenza A
gggctccagcttgtga

SEQ ID NO: 4385 - DNA, 18 bp, Influenza A
gggtcttccatcaactcg

SEQ ID NO: 4386 - DNA, 22 bp, Influenza A
ggtcgaaaatacaaagacttag

SEQ ID NO: 4387 - DNA, 20 bp, Influenza A
ggtcttgacaaaatatgcct

SEQ ID NO: 4388 - DNA, 18 bp, Influenza A
gtactcacgctctttgga

SEQ ID NO: 4389 - DNA, 23 bp, Influenza A
gtatcaaaaagtaaaggacaaaa

SEQ ID NO: 4390 - DNA, 19 bp, Influenza A
gtgatctgcatcttactgg

SEQ ID NO: 4391 - DNA, 20 bp, Influenza A
aaaatcctgctatttgcagc

SEQ ID NO: 4392 - DNA, 19 bp, Influenza A
aaaatgagcacactggatc

SEQ ID NO: 4393 - DNA, 19 bp, Influenza A
aaagcaatgtcacagtcac

SEQ ID NO: 4394 - DNA, 21 bp, Influenza A
aaagtggacacaataattgag

SEQ ID NO: 4395 - DNA, 23 bp, Influenza A
aaatcctgctatttacagttatt

SEQ ID NO: 4396 - DNA, 20 bp, Influenza A
aaatgaagaaagtcctgctt

SEQ ID NO: 4397 - DNA, 19 bp, Influenza A
aaccaacaagccttagaga

SEQ ID NO: 4398 - DNA, 18 bp, Influenza A
aacccgatgtgtgatgat

SEQ ID NO: 4399 - DNA, 22 bp, Influenza A
aactaattggaaagacttcatg

SEQ ID NO: 4400 - DNA, 20 bp, Influenza A
aactccttctatttgcaact

SEQ ID NO: 4401 - DNA, 19 bp, Influenza A
aactggttgaaaatgagca

SEQ ID NO: 4402 - DNA, 22 bp, Influenza A
aagaattgagactgaagtttag

SEQ ID NO: 4403 - DNA, 18 bp, Influenza A
aagccttcacctcaaacg

SEQ ID NO: 4404 - DNA, 22 bp, Influenza A
aatgaagaaagtactgcttttt

SEQ ID NO: 4405 - DNA, 21 bp, Influenza A
aattcaggagtaggagtaacc

SEQ ID NO: 4406 - DNA, 19 bp, Influenza A
acaactcgacagacaaagt

SEQ ID NO: 4407 - DNA, 22 bp, Influenza A
acacaataattgagaacaatgt

SEQ ID NO: 4408 - DNA, 18 bp, Influenza A
acactggatctttctgct

SEQ ID NO: 4409 - DNA, 22 bp, Influenza A
agaaaatgaggaagaattgaga

SEQ ID NO: 4410 - DNA, 20 bp, Influenza A
agaacacactggatcattct

SEQ ID NO: 4411 - DNA, 17 bp, Influenza A
agagaaaccgaaccccg

SEQ ID NO: 4412 - DNA, 17 bp, Influenza A
agcagtgaattccggtg

SEQ ID NO: 4413 - DNA, 19 bp, Influenza A
agcggatgagatctgtatt

SEQ ID NO: 4414 - DNA, 18 bp, Influenza A
agtcttggtgattgctcc

SEQ ID NO: 4415 - DNA, 16 bp, Influenza A
agtggaaaaccaatct

SEQ ID NO: 4416 - DNA, 18 bp, Influenza A
agtggaactggttgagac

SEQ ID NO: 4417 - DNA, 23 bp, Influenza A
agtggagttttagaatttaacaa

SEQ ID NO: 4418 - DNA, 18 bp, Influenza A
agtggggttctcgaattc

SEQ ID NO: 4419 - DNA, 20 bp, Influenza A
atcatcatctgcattcaggc

SEQ ID NO: 4420 - DNA, 19 bp, Influenza A
atcatcctttgcgtgaaag

SEQ ID NO: 4421 - DNA, 21 bp, Influenza A
atgagtacactggatcattct

SEQ ID NO: 4422 - DNA, 17 bp, Influenza A
atgcaaattcgggggtt

SEQ ID NO: 4423 - DNA, 20 bp, Influenza A
atggaaaacaaccaatcagc

SEQ ID NO: 4424 - DNA, 16 bp, Influenza A
atggatggggtgctgt

SEQ ID NO: 4425 - DNA, 19 bp, Influenza A
atgggaaacaaccaacaag

SEQ ID NO: 4426 - DNA, 19 bp, Influenza A
atgtcacagtcactagctc

SEQ ID NO: 4427 - DNA, 18 bp, Influenza A
atgtcacggtcactagct

SEQ ID NO: 4428 - DNA, 21 bp, Influenza A
atgtgtgatgaactaattgga

SEQ ID NO: 4429 - DNA, 16 bp, Influenza A
attccggtgctggtgt

SEQ ID NO: 4430 - DNA, 22 bp, Influenza A
attcgaagtattcacatcaaat

SEQ ID NO: 4431 - DNA, 20 bp, Influenza A
attgagaacaatgtcacagt

SEQ ID NO: 4432 - DNA, 20 bp, Influenza A
attgttcatttgctggatgg

SEQ ID NO: 4433 - DNA, 20 bp, Influenza A
atttaagcaacaactcgaca

SEQ ID NO: 4434 - DNA, 21 bp, Influenza A
atttgcaactatcatcctttg

SEQ ID NO: 4435 - DNA, 20 bp, Influenza A
attttcctttgtgtgaaagc

SEQ ID NO: 4436 - DNA, 20 bp, Influenza A
caacaattcgacagacaaag

SEQ ID NO: 4437 - DNA, 19 bp, Influenza A
caactcgacagacaaagtt

SEQ ID NO: 4438 - DNA, 20 bp, Influenza A
caataagccttggagattgt

SEQ ID NO: 4439 - DNA, 23 bp, Influenza A
caataattgagagtaatgtcacg

SEQ ID NO: 4440 - DNA, 18 bp, Influenza A
caatcgacgggaaagtgc

SEQ ID NO: 4441 - DNA, 18 bp, Influenza A
cactagctcagtggaact

SEQ ID NO: 4442 - DNA, 20 bp, Influenza A
cagaacacactggatcattc

SEQ ID NO: 4443 - DNA, 18 bp, Influenza A
cagtggaactggttgaga

SEQ ID NO: 4444 - DNA, 20 bp, Influenza A
ccaggaactttagagagtga

SEQ ID NO: 4445 - DNA, 17 bp, Influenza A
cctcaaacggatgggga

SEQ ID NO: 4446 - DNA, 17 bp, Influenza A
cgaaccccgttaatgga

SEQ ID NO: 4447 - DNA, 20 bp, Influenza A
cgataagtcttggtgattgc

SEQ ID NO: 4448 - DNA, 20 bp, Influenza A
cgggtactctagaaaatgag

SEQ ID NO: 4449 - DNA, 19 bp, Influenza A
cggttactagctcagttga

SEQ ID NO: 4450 - DNA, 17 bp, Influenza A
ctagctcggtggaactg

SEQ ID NO: 4451 - DNA, 18 bp, Influenza A
ctcctttgctggatggat

SEQ ID NO: 4452 - DNA, 19 bp, Influenza A
ctcgacagacaaagttgac

SEQ ID NO: 4453 - DNA, 19 bp, Influenza A
ctgaagtttagtggggttc

SEQ ID NO: 4454 - DNA, 19 bp, Influenza A
ctgcattggatacctgagc

SEQ ID NO: 4455 - DNA, 21 bp, Influenza A
ctggttgaaaatgagtacact

SEQ ID NO: 4456 - DNA, 20 bp, Influenza A
ctgtatcgggtatttaagca

SEQ ID NO: 4457 - DNA, 22 bp, Influenza A
ctgtattggctatttaagcaac

SEQ ID NO: 4458 - DNA, 20 bp, Influenza A
cttggagactgttcatttgc

SEQ ID NO: 4459 - DNA, 18 bp, Influenza A
ctttctgctcaatcgacg

SEQ ID NO: 4460 - DNA, 22 bp, Influenza A
gaagaactaagactgaaattca

SEQ ID NO: 4461 - DNA, 22 bp, Influenza A
gacctaattggaaagaattcat

SEQ ID NO: 4462 - DNA, 18 bp, Influenza A
gagaacaatgtcacggtc

SEQ ID NO: 4463 - DNA, 21 bp, Influenza A
gatattaggcaaccctatgtg

SEQ ID NO: 4464 - DNA, 22 bp, Influenza A
gatctgtattggctatttaagc

SEQ ID NO: 4465 - DNA, 19 bp, Influenza A
gatgagatctgtatcgggt

SEQ ID NO: 4466 - DNA, 19 bp, Influenza A
gatgggaaagcaccaataa

SEQ ID NO: 4467 - DNA, 18 bp, Influenza A
gattgctcctttgctggg

SEQ ID NO: 4468 - DNA, 21 bp, Influenza A
gatttgattgggaaaacatca

SEQ ID NO: 4469 - DNA, 17 bp, Influenza A
gcattcaggcagacgaa

SEQ ID NO: 4470 - DNA, 17 bp, Influenza A
gccttagagactgctcc

SEQ ID NO: 4471 - DNA, 19 bp, Influenza A
gccttggagattgttcatt

SEQ ID NO: 4472 - DNA, 21 bp, Influenza A
gctatttaagcaacaattcga

SEQ ID NO: 4473 - DNA, 18 bp, Influenza A
gctcagttgaactggttg

SEQ ID NO: 4474 - DNA, 16 bp, Influenza A
gctggtgttaccgcag

SEQ ID NO: 4475 - DNA, 20 bp, Influenza A
ggaaaacaaccaataagcct

SEQ ID NO: 4476 - DNA, 21 bp, Influenza A
ggaaaacatcatggtcttaca

SEQ ID NO: 4477 - DNA, 19 bp, Influenza A
ggaaagtgccgataagtct

SEQ ID NO: 4478 - DNA, 22 bp, Influenza A
ggatcattctgttcaatcaatg

SEQ ID NO: 4479 - DNA, 16 bp, Influenza A
ggatggggagcagtga

SEQ ID NO: 4480 - DNA, 15 bp, Influenza A
ggcaatccccaatgt

SEQ ID NO: 4481 - DNA, 18 bp, Influenza A
gggaaacaaccaatcagc

SEQ ID NO: 4482 - DNA, 17 bp, Influenza A
gggtacctgagcaacaa

SEQ ID NO: 4483 - DNA, 19 bp, Influenza A
ggtgctgtaaattcaggag

SEQ ID NO: 4484 - DNA, 18 bp, Influenza A
ggtggagacagaacacac

SEQ ID NO: 4485 - DNA, 19 bp, Influenza A
ggttgagacagaacacact

SEQ ID NO: 4486 - DNA, 17 bp, Influenza A
gtcacggtcactagctc

SEQ ID NO: 4487 - DNA, 24 bp, Influenza A
aaaaaatatgaaagagtgaagatg

SEQ ID NO: 4488 - DNA, 20 bp, Influenza A
aaaaccaggaagagctaaga

SEQ ID NO: 4489 - DNA, 18 bp, Influenza A
aaaacgttccagtgacac

SEQ ID NO: 4490 - DNA, 21 bp, Influenza A
aaaagagatggaaggaatttg

SEQ ID NO: 4491 - DNA, 19 bp, Influenza A
aaaccgaggctcattctac

SEQ ID NO: 4492 - DNA, 17 bp, Influenza A
aaacgttccggtgacac

SEQ ID NO: 4493 - DNA, 16 bp, Influenza A
aaacgttccggtgacg

SEQ ID NO: 4494 - DNA, 18 bp, Influenza A
aaaggcccaaagagatgg

SEQ ID NO: 4495 - DNA, 18 bp, Influenza A
aacaaaacgttccggtga

SEQ ID NO: 4496 - DNA, 19 bp, Influenza A
aacaactcgactgaaacgg

SEQ ID NO: 4497 - DNA, 19 bp, Influenza A
aacaactcgactgaaactg

SEQ ID NO: 4498 - DNA, 21 bp, Influenza A
aaccaaggctcattctatagg

SEQ ID NO: 4499 - DNA, 21 bp, Influenza A
aacggtaaacacactaattga

SEQ ID NO: 4500 - DNA, 19 bp, Influenza A
aactgaactaggatcacca

SEQ ID NO: 4501 - DNA, 18 bp, Influenza A
aacttgtacacggtggaa

SEQ ID NO: 4502 - DNA, 20 bp, Influenza A
aagagatggaaggagtttgc

SEQ ID NO: 4503 - DNA, 22 bp, Influenza A
aagagtgaagatgtttgatttc

SEQ ID NO: 4504 - DNA, 21 bp, Influenza A
aagatctctgttttcttccat

SEQ ID NO: 4505 - DNA, 21 bp, Influenza A
aagctttgcatatgacaaaat

SEQ ID NO: 4506 - DNA, 21 bp, Influenza A
aagtatgaaagggtgaagatg

SEQ ID NO: 4507 - DNA, 21 bp, Influenza A
aagtggaagaacttgtacatg

SEQ ID NO: 4508 - DNA, 19 bp, Influenza A
aatcctaggcaatcccaaa

SEQ ID NO: 4509 - DNA, 21 bp, Influenza A
aatggaatgtcacatacactg

SEQ ID NO: 4510 - DNA, 18 bp, Influenza A
aattctgggcaatcccaa

SEQ ID NO: 4511 - DNA, 19 bp, Influenza A
acaaacaactcgactgaaa

SEQ ID NO: 4512 - DNA, 19 bp, Influenza A
acacaagtggaagaactcg

SEQ ID NO: 4513 - DNA, 21 bp, Influenza A
acactaattgaacaaaacgtt

SEQ ID NO: 4514 - DNA, 20 bp, Influenza A
accaaatggaatgtcacata

SEQ ID NO: 4515 - DNA, 15 bp, Influenza A
accagcaaggcctgc

SEQ ID NO: 4516 - DNA, 17 bp, Influenza A
acggtggaattgatccg

SEQ ID NO: 4517 - DNA, 18 bp, Influenza A
actagtgctcgatgactg

SEQ ID NO: 4518 - DNA, 20 bp, Influenza A
acttgtacatggtggaattg

SEQ ID NO: 4519 - DNA, 19 bp, Influenza A
agaacttgtacatcgtggg

SEQ ID NO: 4520 - DNA, 17 bp, Influenza A
agagaggcccaaagaga

SEQ ID NO: 4521 - DNA, 18 bp, Influenza A
agagggcctaatcctagg

SEQ ID NO: 4522 - DNA, 22 bp, Influenza A
agagtgaagatgtttgatttca

SEQ ID NO: 4523 - DNA, 18 bp, Influenza A
aggagtttgctatccagg

SEQ ID NO: 4524 - DNA, 17 bp, Influenza A
aggcaaccccaaatgtg

SEQ ID NO: 4525 - DNA, 20 bp, Influenza A
aggcctgcaataatacatca

SEQ ID NO: 4526 - DNA, 18 bp, Influenza A
agggtctaatcctaggca

SEQ ID NO: 4527 - DNA, 19 bp, Influenza A
agtaagctttgcgtatgac

SEQ ID NO: 4528 - DNA, 20 bp, Influenza A
ataatacatcaaaccgaggc

SEQ ID NO: 4529 - DNA, 20 bp, Influenza A
ataccaaacaaacaactcga

SEQ ID NO: 4530 - DNA, 22 bp, Influenza A
atcccaaatgtgatctttattt

SEQ ID NO: 4531 - DNA, 19 bp, Influenza A
atccgatcctatgtggaac

SEQ ID NO: 4532 - DNA, 17 bp, Influenza A
atcctgtgtgggactga

SEQ ID NO: 4533 - DNA, 21 bp, Influenza A
atgaaagagtgaagatgtttg

SEQ ID NO: 4534 - DNA, 20 bp, Influenza A
atgtcacatacactggaacc

SEQ ID NO: 4535 - DNA, 19 bp, Influenza A
atgtcacatacactgggac

SEQ ID NO: 4536 - DNA, 22 bp, Influenza A
attggatatcaaacaaacaact

SEQ ID NO: 4537 - DNA, 20 bp, Influenza A
atttgaatggcagagaatgg

SEQ ID NO: 4538 - DNA, 24 bp, Influenza A
caaaaaatatgaaagagtgaagat

SEQ ID NO: 4539 - DNA, 20 bp, Influenza A
caagctttgcatatgacaaa

SEQ ID NO: 4540 - DNA, 20 bp, Influenza A
caatcccaaatgtgatctct

SEQ ID NO: 4541 - DNA, 22 bp, Influenza A
caatcccaaatgtgatctttat

SEQ ID NO: 4542 - DNA, 21 bp, Influenza A
caattgaaaaccaggaagaac

SEQ ID NO: 4543 - DNA, 19 bp, Influenza A
caccaaatggaatgtcaca

SEQ ID NO: 4544 - DNA, 19 bp, Influenza A
cagtgacacaagtggaaga

SEQ ID NO: 4545 - DNA, 23 bp, Influenza A
catcaaaaaatatgaaagagtga

SEQ ID NO: 4546 - DNA, 19 bp, Influenza A
catcaaaccaaggctcatt

SEQ ID NO: 4547 - DNA, 19 bp, Influenza A
ccaaagagatggaaggagt

SEQ ID NO: 4548 - DNA, 19 bp, Influenza A
ccactagtactcgatgact

SEQ ID NO: 4549 - DNA, 15 bp, Influenza A
ccggtgacgcaggtg

SEQ ID NO: 4550 - DNA, 18 bp, Influenza A
cctgtgtggaactgaact

SEQ ID NO: 4551 - DNA, 17 bp, Influenza A
cgatcctgtgtggaacg

SEQ ID NO: 4552 - DNA, 21 bp, Influenza A
cgatgactgttcattagaagg

SEQ ID NO: 4553 - DNA, 17 bp, Influenza A
cgcaggtggaagaactt

SEQ ID NO: 4554 - DNA, 17 bp, Influenza A
cggtgacacaagtggaa

SEQ ID NO: 4555 - DNA, 15 bp, Influenza A
cggtgacgcaggtgg

SEQ ID NO: 4556 - DNA, 21 bp, Influenza A
ctaagatctctgttttcctcc

SEQ ID NO: 4557 - DNA, 22 bp, Influenza A
ctaagatctctgttttcttcca

SEQ ID NO: 4558 - DNA, 21 bp, Influenza A
ctaattgaacaaaacgttcca

SEQ ID NO: 4559 - DNA, 18 bp, Influenza A
ctaggcaaccccaaatgt

SEQ ID NO: 4560 - DNA, 19 bp, Influenza A
ctcgacagaaacggtaaac

SEQ ID NO: 4561 - DNA, 21 bp, Influenza A
ctcgatgactgttcattagaa

SEQ ID NO: 4562 - DNA, 18 bp, Influenza A
ctgttcattagagggcct

SEQ ID NO: 4563 - DNA, 23 bp, Influenza A
cttccatcaaaaagtatgaaagg

SEQ ID NO: 4564 - DNA, 17 bp, Influenza A
cttggcagcaagctttg

SEQ ID NO: 4565 - DNA, 20 bp, Influenza A
ctttatttgaatggcaggga

SEQ ID NO: 4566 - DNA, 18 bp, Influenza A
gaagaactcgtgcatggc

SEQ ID NO: 4567 - DNA, 20 bp, Influenza A
gaagaacttgtacatggtgg

SEQ ID NO: 4568 - DNA, 21 bp, Influenza A
gaagatgtttgatttcaccaa

SEQ ID NO: 4569 - DNA, 20 bp, Influenza A
gaatgtcacatacactggaa

SEQ ID NO: 4570 - DNA, 20 bp, Influenza A
gactgttcattagagggtct

SEQ ID NO: 4571 - DNA, 17 bp, Influenza A
gaggcccaaagagatgg

SEQ ID NO: 4572 - DNA, 18 bp, Influenza A
gagtactgtcttggcagc

SEQ ID NO: 4573 - DNA, 17 bp, Influenza A
gatcctgtgtggaacgg

SEQ ID NO: 4574 - DNA, 21 bp, Influenza A
gatctttatttgaatggcagg

SEQ ID NO: 4575 - DNA, 19 bp, Influenza A
gattgatccgatcctgtgt

SEQ ID NO: 4576 - DNA, 21 bp, Influenza A
gatttcaccaaatggaatgtc

SEQ ID NO: 4577 - DNA, 16 bp, Influenza A
gcaaggcctgcaaaga

SEQ ID NO: 4578 - DNA, 18 bp, Influenza A
gcaggtggaagaacttgt

SEQ ID NO: 4579 - DNA, 21 bp, Influenza A
gcttgatgactgttcattaga

SEQ ID NO: 4580 - DNA, 21 bp, Influenza A
ggaattaggatcaccactagt

SEQ ID NO: 4581 - DNA, 18 bp, Influenza A
ggcctgcaatgatacatc

SEQ ID NO: 4582 - DNA, 19 bp, Influenza A
gggcctgcaataatacatc

SEQ ID NO: 4583 - DNA, 20 bp, Influenza A
gggtgaagatgtttgatttc

SEQ ID NO: 4584 - DNA, 19 bp, Influenza A
ggtctaatcctaggcaacc

SEQ ID NO: 4585 - DNA, 19 bp, Influenza A
ggtggaattgatccgatcc

SEQ ID NO: 4586 - DNA, 21 bp, Influenza A
gtgaacacactaattgaacaa

SEQ ID NO: 4587 - DNA, 21 bp, Influenza A
gtgatctttatttgaatggca

SEQ ID NO: 4588 - DNA, 20 bp, Influenza A
aaaagttgacacactgttgg

SEQ ID NO: 4589 - DNA, 19 bp, Influenza A
aaaccacacaggaacatac

SEQ ID NO: 4590 - DNA, 19 bp, Influenza A
aaatggacatccaagcagt

SEQ ID NO: 4591 - DNA, 18 bp, Influenza A
aacaaaccacacaggaac

SEQ ID NO: 4592 - DNA, 19 bp, Influenza A
aacaacaatggtgaactca

SEQ ID NO: 4593 - DNA, 17 bp, Influenza A
aagacccatctgcacct

SEQ ID NO: 4594 - DNA, 22 bp, Influenza A
aagctctattgatctagttgaa

SEQ ID NO: 4595 - DNA, 19 bp, Influenza A
aagttgacacactgttgga

SEQ ID NO: 4596 - DNA, 19 bp, Influenza A
acaacaatggtgaactcag

SEQ ID NO: 4597 - DNA, 20 bp, Influenza A
acactgttggagaatgatgt

SEQ ID NO: 4598 - DNA, 19 bp, Influenza A
acatggggatcagagaatg

SEQ ID NO: 4599 - DNA, 20 bp, Influenza A
accaactcatcagaaaaagt

SEQ ID NO: 4600 - DNA, 18 bp, Influenza A
accagcaactttgggatc

SEQ ID NO: 4601 - DNA, 15 bp, Influenza A
accccgcggcccctc

SEQ ID NO: 4602 - DNA, 15 bp, Influenza A
acgtgcgtacaggcc

SEQ ID NO: 4603 - DNA, 16 bp, Influenza A
acttcttggggggcag

SEQ ID NO: 4604 - DNA, 19 bp, Influenza A
acttgacggtacaacatct

SEQ ID NO: 4605 - DNA, 19 bp, Influenza A
agaatatgcgtggggtatc

SEQ ID NO: 4606 - DNA, 20 bp, Influenza A
agaatgatgttccagtcaca

SEQ ID NO: 4607 - DNA, 19 bp, Influenza A
agacacttgttcagtggaa

SEQ ID NO: 4608 - DNA, 18 bp, Influenza A
agactgtagcttcgaggg

SEQ ID NO: 4609 - DNA, 19 bp, Influenza A
agagagtggtcatacctga

SEQ ID NO: 4610 - DNA, 21 bp, Influenza A
agagtggtcatatttgattga

SEQ ID NO: 4611 - DNA, 18 bp, Influenza A
agatggaatcagcccagt

SEQ ID NO: 4612 - DNA, 19 bp, Influenza A
agatggctctcaatgtcat

SEQ ID NO: 4613 - DNA, 20 bp, Influenza A
agcaccaattcatcagaaag

SEQ ID NO: 4614 - DNA, 15 bp, Influenza A
agcctgcaccagcaa

SEQ ID NO: 4615 - DNA, 19 bp, Influenza A
agctttgagggttggatag

SEQ ID NO: 4616 - DNA, 19 bp, Influenza A
aggagaattggacaacaac

SEQ ID NO: 4617 - DNA, 17 bp, Influenza A
agtatcatcggcctgcc

SEQ ID NO: 4618 - DNA, 17 bp, Influenza A
agtccagtgcatttggg

SEQ ID NO: 4619 - DNA, 18 bp, Influenza A
ataacacgggaaccaaca

SEQ ID NO: 4620 - DNA, 21 bp, Influenza A
atacttaagcaccaactcatc

SEQ ID NO: 4621 - DNA, 18 bp, Influenza A
atatgcgtggggtatctg

SEQ ID NO: 4622 - DNA, 20 bp, Influenza A
atcagatctttcagcagaac

SEQ ID NO: 4623 - DNA, 21 bp, Influenza A
atcaggtcattcagtagaacg

SEQ ID NO: 4624 - DNA, 18 bp, Influenza A
atcgcacctacttcttgg

SEQ ID NO: 4625 - DNA, 21 bp, Influenza A
atctagttgaaacaaaccaca

SEQ ID NO: 4626 - DNA, 19 bp, Influenza A
atgatggagcaacatctgc

SEQ ID NO: 4627 - DNA, 18 bp, Influenza A
atggagaattgaggcacc

SEQ ID NO: 4628 - DNA, 17 bp, Influenza A
atgggctttgctaccct

SEQ ID NO: 4629 - DNA, 15 bp, Influenza A
attgaggaccccgcg

SEQ ID NO: 4630 - DNA, 19 bp, Influenza A
attgcagctttgaaggatg

SEQ ID NO: 4631 - DNA, 18 bp, Influenza A
atttgggagattgcagct

SEQ ID NO: 4632 - DNA, 20 bp, Influenza A
caattcatcagaaagggtcg

SEQ ID NO: 4633 - DNA, 18 bp, Influenza A
cacgctccttgaaaatgg

SEQ ID NO: 4634 - DNA, 20 bp, Influenza A
cactgttggagaatgatgtt

SEQ ID NO: 4635 - DNA, 21 bp, Influenza A
cagaaaaagttaacacactgt

SEQ ID NO: 4636 - DNA, 17 bp, Influenza A
cagagttgatcgcacct

SEQ ID NO: 4637 - DNA, 17 bp, Influenza A
cagcacatgcgtacagg

SEQ ID NO: 4638 - DNA, 20 bp, Influenza A
cagtagaacggaattgatcc

SEQ ID NO: 4639 - DNA, 19 bp, Influenza A
catacctgattgaggaccc

SEQ ID NO: 4640 - DNA, 18 bp, Influenza A
catcagaaagggtcgaca

SEQ ID NO: 4641 - DNA, 19 bp, Influenza A
catgcagacagaatatgcg

SEQ ID NO: 4642 - DNA, 17 bp, Influenza A
catgggctttgctaccc

SEQ ID NO: 4643 - DNA, 18 bp, Influenza A
catttgggagattgcagc

SEQ ID NO: 4644 - DNA, 16 bp, Influenza A
ccacctacctcctggg

SEQ ID NO: 4645 - DNA, 18 bp, Influenza A
ccagcaactttgggatca

SEQ ID NO: 4646 - DNA, 18 bp, Influenza A
ccagctccattgatctga

SEQ ID NO: 4647 - DNA, 20 bp, Influenza A
ccattgatctgattgagaca

SEQ ID NO: 4648 - DNA, 16 bp, Influenza A
cccacctacctcctgg

SEQ ID NO: 4649 - DNA, 19 bp, Influenza A
cccaggagagttagacaac

SEQ ID NO: 4650 - DNA, 16 bp, Influenza A
cccagtcaccagctcc

SEQ ID NO: 4651 - DNA, 15 bp, Influenza A
ccccgcggcccctca

SEQ ID NO: 4652 - DNA, 18 bp, Influenza A
cctcatggactgtgctac

SEQ ID NO: 4653 - DNA, 16 bp, Influenza A
cctcctggggggaagt

SEQ ID NO: 4654 - DNA, 17 bp, Influenza A
cctctgcacctcatgga

SEQ ID NO: 4655 - DNA, 15 bp, Influenza A
cgacacgctcctgga

SEQ ID NO: 4656 - DNA, 20 bp, Influenza A
cgaccaatcataatctcgtt

SEQ ID NO: 4657 - DNA, 18 bp, Influenza A
cgagacaaaccacacagg

SEQ ID NO: 4658 - DNA, 17 bp, Influenza A
cgcacctacttcttggg

SEQ ID NO: 4659 - DNA, 19 bp, Influenza A
cggagaattgaggcatttg

SEQ ID NO: 4660 - DNA, 20 bp, Influenza A
ctagcaactttggaatcaga

SEQ ID NO: 4661 - DNA, 18 bp, Influenza A
ctagccacacaggaacat

SEQ ID NO: 4662 - DNA, 17 bp, Influenza A
ctcctggggggaagtac

SEQ ID NO: 4663 - DNA, 20 bp, Influenza A
ctgatagaatctgtgtggga

SEQ ID NO: 4664 - DNA, 18 bp, Influenza A
ctgcctgtactagcaact

SEQ ID NO: 4665 - DNA, 15 bp, Influenza A
ctgcctgtgccagca

SEQ ID NO: 4666 - DNA, 18 bp, Influenza A
ctgtcgatctggttgaga

SEQ ID NO: 4667 - DNA, 19 bp, Influenza A
ctgtgtgggatacttaagc

SEQ ID NO: 4668 - DNA, 20 bp, Influenza A
ctgttcagtggaatcagatc

SEQ ID NO: 4669 - DNA, 18 bp, Influenza A
cttcgagggttggattgt

SEQ ID NO: 4670 - DNA, 18 bp, Influenza A
cttcttggggagaggtga

SEQ ID NO: 4671 - DNA, 19 bp, Influenza A
cttgcagagataacacggg

SEQ ID NO: 4672 - DNA, 16 bp, Influenza A
gaaacccagcctgcac

SEQ ID NO: 4673 - DNA, 16 bp, Influenza A
gaaagggtcgacacgc

SEQ ID NO: 4674 - DNA, 19 bp, Influenza A
gaaccaacagcttctatcg

SEQ ID NO: 4675 - DNA, 22 bp, Influenza A
gaatcagatctttcagtagaac

SEQ ID NO: 4676 - DNA, 19 bp, Influenza A
gaatgatgttccagtcaca

SEQ ID NO: 4677 - DNA, 19 bp, Influenza A
gaattgatcccacctacct

SEQ ID NO: 4678 - DNA, 19 bp, Influenza A
gacacttgttcagtggaat

SEQ ID NO: 4679 - DNA, 19 bp, Influenza A
gagaggtgaatgatggagc

SEQ ID NO: 4680 - DNA, 19 bp, Influenza A
gagagtggtcatacctgat

SEQ ID NO: 4681 - DNA, 18 bp, Influenza A
gaggcatttgttcagtgg

SEQ ID NO: 4682 - DNA, 18 bp, Influenza A
gatgtcccggttacaagt

SEQ ID NO: 4683 - DNA, 19 bp, Influenza A
gattgcagctttgaaggat

SEQ ID NO: 4684 - DNA, 18 bp, Influenza A
gcagacagaatatgcgtg

SEQ ID NO: 4685 - DNA, 19 bp, Influenza A
gcatttgggagactgtagc

SEQ ID NO: 4686 - DNA, 15 bp, Influenza A
gcctgcaccagcaac

SEQ ID NO: 4687 - DNA, 18 bp, Influenza A
gcgtacaggctgatagaa

SEQ ID NO: 4688 - DNA, 23 bp, Influenza A
gcttctatcgaaatttagtttgg

SEQ ID NO: 4689 - DNA, 16 bp, Influenza A
ggaaacccagcctgca

SEQ ID NO: 4690 - DNA, 19 bp, Influenza A
ggaattgatcccacctacc

SEQ ID NO: 4691 - DNA, 19 bp, Influenza A
ggacaacaacggagaattg

SEQ ID NO: 4692 - DNA, 21 bp, Influenza A
ggagaattaaacaacaatggt

SEQ ID NO: 4693 - DNA, 18 bp, Influenza A
ggagattgcagctttgag

SEQ ID NO: 4694 - DNA, 17 bp, Influenza A
ggagtcagtccagtgca

SEQ ID NO: 4695 - DNA, 17 bp, Influenza A
ggattggtggaaaccca

SEQ ID NO: 4696 - DNA, 17 bp, Influenza A
gggggcagtgaatgatg

SEQ ID NO: 4697 - DNA, 18 bp, Influenza A
gggtatctgagcaccaat

SEQ ID NO: 4698 - DNA, 15 bp, Influenza A
gggtcgacacgctcc

SEQ ID NO: 4699 - DNA, 16 bp, Influenza A
ggtcccagtcaccagc

SEQ ID NO: 4700 - DNA, 19 bp, Influenza A
ggtgaactcagacacttgt

SEQ ID NO: 4701 - DNA, 21 bp, Influenza A
gtaggatacttaagcaccaac

SEQ ID NO: 4702 - DNA, 22 bp, Influenza A
gtcatacttgattgaagatccc

SEQ ID NO: 4703 - DNA, 17 bp, Influenza A
gtccagtgcatttggga

SEQ ID NO: 4704 - DNA, 21 bp, Influenza A
gtcgcactcttgatattaacc

SEQ ID NO: 4705 - DNA, 19 bp, Influenza A
gtgaactcagacacttgtt

SEQ ID NO: 4706 - DNA, 19 bp, Influenza A
aaaacggcacatctgttaa

SEQ ID NO: 4707 - DNA, 22 bp, Influenza A
aaagaattagttgagacgaacc

SEQ ID NO: 4708 - DNA, 19 bp, Influenza A
aaatgggacaacaggaaac

SEQ ID NO: 4709 - DNA, 21 bp, Influenza A
aacaggaaaccccattatatg

SEQ ID NO: 4710 - DNA, 18 bp, Influenza A
aagactgccacctcatca

SEQ ID NO: 4711 - DNA, 16 bp, Influenza A
aagcttgtcgacgggc

SEQ ID NO: 4712 - DNA, 18 bp, Influenza A
aagttgacggatcaagca

SEQ ID NO: 4713 - DNA, 19 bp, Influenza A
aattcacctggaatggtgt

SEQ ID NO: 4714 - DNA, 17 bp, Influenza A
acaccacttgggatgtc

SEQ ID NO: 4715 - DNA, 19 bp, Influenza A
acactaacagacaatcacg

SEQ ID NO: 4716 - DNA, 18 bp, Influenza A
accacactgatgaactgt

SEQ ID NO: 4717 - DNA, 18 bp, Influenza A
acctcatcaatggtgcat

SEQ ID NO: 4718 - DNA, 16 bp, Influenza A
acggatcaagcagtgc

SEQ ID NO: 4719 - DNA, 20 bp, Influenza A
acttgggatgtcttcattga

SEQ ID NO: 4720 - DNA, 21 bp, Influenza A
agaattagttgagacgaaaca

SEQ ID NO: 4721 - DNA, 18 bp, Influenza A
agcagtgcttgtttgagg

SEQ ID NO: 4722 - DNA, 17 bp, Influenza A
agcagtgggagtttgga

SEQ ID NO: 4723 - DNA, 17 bp, Influenza A
aggacaccacttgggat

SEQ ID NO: 4724 - DNA, 17 bp, Influenza A
atccattcgacgtccca

SEQ ID NO: 4725 - DNA, 18 bp, Influenza A
atcctagcaagcagtggg

SEQ ID NO: 4726 - DNA, 17 bp, Influenza A
atgaactgtgcccaagc

SEQ ID NO: 4727 - DNA, 17 bp, Influenza A
atggtgcattggggagt

SEQ ID NO: 4728 - DNA, 17 bp, Influenza A
caagcagtgggagtctg

SEQ ID NO: 4729 - DNA, 20 bp, Influenza A
cagacaatcacgtagaagtt

SEQ ID NO: 4730 - DNA, 17 bp, Influenza A
catgcagtggaaaacgg

SEQ ID NO: 4731 - DNA, 17 bp, Influenza A
cattcgacgtcccagat

SEQ ID NO: 4732 - DNA, 19 bp, Influenza A
ccacactgcttattctcag

SEQ ID NO: 4733 - DNA, 16 bp, Influenza A
cccaagccccttgaag

SEQ ID NO: 4734 - DNA, 19 bp, Influenza A
cccattatatgcttggggc

SEQ ID NO: 4735 - DNA, 18 bp, Influenza A
ccttgaagcttgtcgacg

SEQ ID NO: 4736 - DNA, 19 bp, Influenza A
cgaacaattcacctggaat

SEQ ID NO: 4737 - DNA, 16 bp, Influenza A
cgacgggcaagactgc

SEQ ID NO: 4738 - DNA, 17 bp, Influenza A
cgccgaacaattcacct

SEQ ID NO: 4739 - DNA, 18 bp, Influenza A
cgtagaagttgtgtcagc

SEQ ID NO: 4740 - DNA, 18 bp, Influenza A
ctcagaagcatcctagca

SEQ ID NO: 4741 - DNA, 18 bp, Influenza A
ctgcgacctcatcaatgg

SEQ ID NO: 4742 - DNA, 16 bp, Influenza A
gaactgtgcccaagcc

SEQ ID NO: 4743 - DNA, 19 bp, Influenza A
gacaatcacgtggaagttg

SEQ ID NO: 4744 - DNA, 18 bp, Influenza A
gacgtcccagattaccag

SEQ ID NO: 4745 - DNA, 19 bp, Influenza A
gagacgaaacacactgatg

SEQ ID NO: 4746 - DNA, 18 bp, Influenza A
gagtttggagttcatcgc

SEQ ID NO: 4747 - DNA, 21 bp, Influenza A
gattaccagagtctcagaagc

SEQ ID NO: 4748 - DNA, 20 bp, Influenza A
gcagtagacacatgttatcc

SEQ ID NO: 4749 - DNA, 18 bp, Influenza A
gcattctagcaagcagtg

SEQ ID NO: 4750 - DNA, 17 bp, Influenza A
gccccttgaagcttgtc

SEQ ID NO: 4751 - DNA, 16 bp, Influenza A
gctctgagccacactg

SEQ ID NO: 4752 - DNA, 16 bp, Influenza A
gcttcttctcccggct

SEQ ID NO: 4753 - DNA, 17 bp, Influenza A
ggaaaacggcacatctg

SEQ ID NO: 4754 - DNA, 20 bp, Influenza A
ggaaaccccattatatgctt

SEQ ID NO: 4755 - DNA, 19 bp, Influenza A
ggaatggtgtcaaagttga

SEQ ID NO: 4756 - DNA, 17 bp, Influenza A
ggacaacaggaaacccc

SEQ ID NO: 4757 - DNA, 17 bp, Influenza A
ggctgtgatcgtttgca

SEQ ID NO: 4758 - DNA, 18 bp, Influenza A
gggagtctggagttcatc

SEQ ID NO: 4759 - DNA, 16 bp, Influenza A
gggcaagactgcgacc

SEQ ID NO: 4760 - DNA, 15 bp, Influenza A
ggggcggtcgcaaca

SEQ ID NO: 4761 - DNA, 19 bp, Influenza A
gtctcagaagcattctagc

SEQ ID NO: 4762 - DNA, 17 bp, Influenza A
aaaacagacggggcaac

SEQ ID NO: 4763 - DNA, 17 bp, Influenza A
aaagcagtggacctggg

SEQ ID NO: 4764 - DNA, 19 bp, Influenza A
aaagggaagaaagcagtgg

SEQ ID NO: 4765 - DNA, 22 bp, Influenza A
aaataatcagagaatctggtgg

SEQ ID NO: 4766 - DNA, 20 bp, Influenza A
aacagtgtcctctttctact

SEQ ID NO: 4767 - DNA, 18 bp, Influenza A
aataagaacagacggggc

SEQ ID NO: 4768 - DNA, 21 bp, Influenza A
aatactgggaactatcattgg

SEQ ID NO: 4769 - DNA, 19 bp, Influenza A
aatgaggaagcactgagac

SEQ ID NO: 4770 - DNA, 23 bp, Influenza A
aattcaaagctgatctgataata

SEQ ID NO: 4771 - DNA, 21 bp, Influenza A
acaatgtgatcttcatcttga

SEQ ID NO: 4772 - DNA, 17 bp, Influenza A
accagtgcgtgtaagag

SEQ ID NO: 4773 - DNA, 17 bp, Influenza A
acggagacagtggagat

SEQ ID NO: 4774 - DNA, 18 bp, Influenza A
actatcattgggcctcca

SEQ ID NO: 4775 - DNA, 18 bp, Influenza A
actgtcgatggtgagatc

SEQ ID NO: 4776 - DNA, 15 bp, Influenza A
agacggggcaaccag

SEQ ID NO: 4777 - DNA, 19 bp, Influenza A
agagccaatgggatttaga

SEQ ID NO: 4778 - DNA, 17 bp, Influenza A
agatttgtctcgggcac

SEQ ID NO: 4779 - DNA, 22 bp, Influenza A
agctgatctgataatagaaaga

SEQ ID NO: 4780 - DNA, 22 bp, Influenza A
agtggagattacaggaataaat

SEQ ID NO: 4781 - DNA, 22 bp, Influenza A
caaatcattgtcattctagtcc

SEQ ID NO: 4782 - DNA, 21 bp, Influenza A
caatgggctttagatattcag

SEQ ID NO: 4783 - DNA, 19 bp, Influenza A
cactaatgaggaagcactg

SEQ ID NO: 4784 - DNA, 21 bp, Influenza A
caggaagattcactaatgagg

SEQ ID NO: 4785 - DNA, 21 bp, Influenza A
caggaataaataaagtgtgca

SEQ ID NO: 4786 - DNA, 17 bp, Influenza A
cattgggcctccacaat

SEQ ID NO: 4787 - DNA, 17 bp, Influenza A
cctcggactgtcaatgg

SEQ ID NO: 4788 - DNA, 17 bp, Influenza A
cggtggacttgggatct

SEQ ID NO: 4789 - DNA, 22 bp, Influenza A
cttaaattcaaagctgatctga

SEQ ID NO: 4790 - DNA, 22 bp, Influenza A
gaaagaagaaattcaagtgaca

SEQ ID NO: 4791 - DNA, 18 bp, Influenza A
gaaaggagtggaagtggt

SEQ ID NO: 4792 - DNA, 21 bp, Influenza A
gaaattcaagtgacatctgtt

SEQ ID NO: 4793 - DNA, 17 bp, Influenza A
gaagaaagcggtggact

SEQ ID NO: 4794 - DNA, 20 bp, Influenza A
gaatctggtggaattgacaa

SEQ ID NO: 4795 - DNA, 20 bp, Influenza A
gaattgacaaagagccaatg

SEQ ID NO: 4796 - DNA, 25 bp, Influenza A
gatctgataatagaaagaagaaatt

SEQ ID NO: 4797 - DNA, 20 bp, Influenza A
gatcttgtggaatactggga

SEQ ID NO: 4798 - DNA, 15 bp, Influenza A
gcaccatgccgtagc

SEQ ID NO: 4799 - DNA, 20 bp, Influenza A
ggaagcactgagacaaataa

SEQ ID NO: 4800 - DNA, 17 bp, Influenza A
ggaagtggtcaatgcca

SEQ ID NO: 4801 - DNA, 17 bp, Influenza A
ggacctgggatcttgtg

SEQ ID NO: 4802 - DNA, 19 bp, Influenza A
ggagacagtggagattacc

SEQ ID NO: 4803 - DNA, 22 bp, Influenza A
ggagattaccggaatagataaa

SEQ ID NO: 4804 - DNA, 24 bp, Influenza A
gggatttagatattcaggaataaa

SEQ ID NO: 4805 - DNA, 20 bp, Influenza A
ggtgagatctgacaagattt

SEQ ID NO: 4806 - DNA, 19 bp, Influenza A
gtcattctagtcctcggac

SEQ ID NO: 4807 - DNA, 22 bp, Influenza A
gtgactctcatcttaaattcaa

SEQ ID NO: 4808 - DNA, 24 bp, Influenza A
gtattgaaatacaatggcataata

SEQ ID NO: 4809 - DNA, 22 bp, Influenza A
atacaatggcataataacagac

SEQ ID NO: 4810 - DNA, 22 bp, Influenza A
attgaaatacaacggcataata

SEQ ID NO: 4811 - DNA, 22 bp, Influenza A
gcataataacagacactatcaa

SEQ ID NO: 4812 - DNA, 24 bp, Influenza A
aatcaaaatttggagtatcaaata

SEQ ID NO: 4813 - DNA, 23 bp, Influenza A
cctaattatcactatgaggaatg

SEQ ID NO: 4814 - DNA, 21 bp, Influenza A
aatggcataataacagacact

SEQ ID NO: 4815 - DNA, 23 bp, Influenza A
caaaatttggagtatcaaatagg

SEQ ID NO: 4816 - DNA, 21 bp, Influenza A
tggctgtattgaaatacaatg

SEQ ID NO: 4817 - DNA, 21 bp, Influenza A
ctgtattgaaatacaatggca

SEQ ID NO: 4818 - DNA, 18 bp, Influenza A
ccacttggaatgcagaac

SEQ ID NO: 4819 - DNA, 19 bp, Influenza A
tcacttggaatgcagaacc

SEQ ID NO: 4820 - DNA, 19 bp, Influenza A
ctcacttggaatgcagaac

SEQ ID NO: 4821 - DNA, 21 bp, Influenza A
ttgctttactgtaatgactga

SEQ ID NO: 4822 - DNA, 20 bp, Influenza A
gacactatcaagagttggag

SEQ ID NO: 4823 - DNA, 20 bp, Influenza A
acagacactatcaagagttg

SEQ ID NO: 4824 - DNA, 21 bp, Influenza A
tgctttactgtaatgactgac

SEQ ID NO: 4825 - DNA, 19 bp, Influenza A
agtctgaatgtgcatgtgt

SEQ ID NO: 4826 - DNA, 21 bp, Influenza A
ttgacaattggaatttctggc

SEQ ID NO: 4827 - DNA, 19 bp, Influenza A
cttggaatgcagaaccttt

SEQ ID NO: 4828 - DNA, 22 bp, Influenza A
attggatcaatctgtatggtaa

SEQ ID NO: 4829 - DNA, 20 bp, Influenza A
aaccattggatcaatctgtc

SEQ ID NO: 4830 - DNA, 22 bp, Influenza A
gctcctaattatcactatgagg

SEQ ID NO: 4831 - DNA, 19 bp, Influenza A
tcaagagttggaggaacaa

SEQ ID NO: 4832 - DNA, 20 bp, Influenza A
tgacaattggaatttctggc

SEQ ID NO: 4833 - DNA, 19 bp, Influenza A
ttggaatgcagaacctttt

SEQ ID NO: 4834 - DNA, 22 bp, Influenza A
caatatgggttagtcattcaat

SEQ ID NO: 4835 - DNA, 23 bp, Influenza A
tatctttcaatcaaaatttggag

SEQ ID NO: 4836 - DNA, 19 bp, Influenza A
tttggaatgcagaaccttt

SEQ ID NO: 4837 - DNA, 22 bp, Influenza A
ggatcaatctgtatggtaattg

SEQ ID NO: 4838 - DNA, 23 bp, Influenza A
gggtatctttcaatcaaaatttg

SEQ ID NO: 4839 - DNA, 21 bp, Influenza A
cattcaccattgacaagtaat

SEQ ID NO: 4840 - DNA, 19 bp, Influenza A
cgggcaattcatctctttg

SEQ ID NO: 4841 - DNA, 21 bp, Influenza A
tggctgtattaaaatacaacg

SEQ ID NO: 4842 - DNA, 21 bp, Influenza A
gggatgtgtttgttataagag

SEQ ID NO: 4843 - DNA, 21 bp, Influenza A
ggggatgtgtttgttataaga

SEQ ID NO: 4844 - DNA, 19 bp, Influenza A
ttggaatgcagaaccttct

SEQ ID NO: 4845 - DNA, 19 bp, Influenza A
atgtgcatgtgtaaatggc

SEQ ID NO: 4846 - DNA, 22 bp, Influenza A
tgggtatctttcaatcaaaatt

SEQ ID NO: 4847 - DNA, 18 bp, Influenza A
cctgttatcctgatgccg

SEQ ID NO: 4848 - DNA, 26 bp, Influenza A
aaattggaaatataatctcaatatgg

SEQ ID NO: 4849 - DNA, 23 bp, Influenza A
aacataatctcaatatgggttag

SEQ ID NO: 4850 - DNA, 19 bp, Influenza A
cggcaattcatctctttgt

SEQ ID NO: 4851 - DNA, 19 bp, Influenza A
caattcatctctttgccct

SEQ ID NO: 4852 - DNA, 22 bp, Influenza A
caatctgtatggtaattggaat

SEQ ID NO: 4853 - DNA, 19 bp, Influenza A
tttgagtctgttgcttggt

SEQ ID NO: 4854 - DNA, 19 bp, Influenza A
ggtttgagtctgttgcttg

SEQ ID NO: 4855 - DNA, 19 bp, Influenza A
atttggaatgcagaacctt

SEQ ID NO: 4856 - DNA, 22 bp, Influenza A
ggaacataatctcaatatgggt

SEQ ID NO: 4857 - DNA, 22 bp, Influenza A
atcaatctgtatggtaattgga

SEQ ID NO: 4858 - DNA, 20 bp, Influenza A
taaatggctcttgctttact

SEQ ID NO: 4859 - DNA, 20 bp, Influenza A
ggcaattcatctctttgttc

SEQ ID NO: 4860 - DNA, 20 bp, Influenza A
ataaccatcggatcaatctg

SEQ ID NO: 4861 - DNA, 20 bp, Influenza A
ggcaattcatctctttgtcc

SEQ ID NO: 4862 - DNA, 22 bp, Influenza A
gaacataatctcaatatgggtt

SEQ ID NO: 4863 - DNA, 25 bp, Influenza A
aaattggaaacataatctcaatatg

SEQ ID NO: 4864 - DNA, 19 bp, Influenza A
catttggaatgcagaacct

SEQ ID NO: 4865 - DNA, 24 bp, Influenza A
attggatcaatctgtatgataatt

SEQ ID NO: 4866 - DNA, 18 bp, Influenza A
gtggagttttcggagaca

SEQ ID NO: 4867 - DNA, 22 bp, Influenza A
ttataagagagccattcatctc

SEQ ID NO: 4868 - DNA, 20 bp, Influenza A
gtggatgggctatatacagt

SEQ ID NO: 4869 - DNA, 19 bp, Influenza A
caaggtttgagtctgttgc

SEQ ID NO: 4870 - DNA, 21 bp, Influenza A
cccatataactcaaggtttga

SEQ ID NO: 4871 - DNA, 22 bp, Influenza A
ataatctcaatatgggttagcc

SEQ ID NO: 4872 - DNA, 21 bp, Influenza A
tagtggatgggctatatacag

SEQ ID NO: 4873 - DNA, 22 bp, Influenza A
ctcaatatgggttagtcattca

SEQ ID NO: 4874 - DNA, 22 bp, Influenza A
atctcaatatgggttagtcatt

SEQ ID NO: 4875 - DNA, 17 bp, Influenza A
cccacttggaatgcaga

SEQ ID NO: 4876 - DNA, 18 bp, Influenza A
tggaatgcagaaccttct

SEQ ID NO: 4877 - DNA, 23 bp, Influenza A
cataatctcaatatgggttagtc

SEQ ID NO: 4878 - DNA, 19 bp, Influenza A
attagcgggcaattcatct

SEQ ID NO: 4879 - DNA, 22 bp, Influenza A
gatcaatctgtatggtagttgg

SEQ ID NO: 4880 - DNA, 22 bp, Influenza A
tctccatataactcaaggtttg

SEQ ID NO: 4881 - DNA, 21 bp, Influenza A
agagttggaggaataacatac

SEQ ID NO: 4882 - DNA, 18 bp, Influenza A
ttgagtctgttgcttggt

SEQ ID NO: 4883 - DNA, 22 bp, Influenza A
ggaaacataatctcaatatggg

SEQ ID NO: 4884 - DNA, 24 bp, Influenza A
attggaaacataatctcaatatgg

SEQ ID NO: 4885 - DNA, 18 bp, Influenza A
ctgttatcctgatgccgg

SEQ ID NO: 4886 - DNA, 26 bp, Influenza A
aataattagcttaatgttacaaattg

SEQ ID NO: 4887 - DNA, 21 bp, Influenza A
ggatgggctatatacagtaaa

SEQ ID NO: 4888 - DNA, 21 bp, Influenza A
tatcactatgaggaatgctcc

SEQ ID NO: 4889 - DNA, 19 bp, Influenza A
gttctcacttggaatgcag

SEQ ID NO: 4890 - DNA, 19 bp, Influenza A
ctctcacttggaatgcagg

SEQ ID NO: 4891 - DNA, 22 bp, Influenza A
ttaaatcagtcgaattgaatgc

SEQ ID NO: 4892 - DNA, 20 bp, Influenza A
gcaattcatctctttgtccc

SEQ ID NO: 4893 - DNA, 22 bp, Influenza A
tatgggttagtcattcaattca

SEQ ID NO: 4894 - DNA, 22 bp, Influenza A
gttagcttgatgttacaaattg

SEQ ID NO: 4895 - DNA, 19 bp, Influenza A
attcatctcatgctcccac

SEQ ID NO: 4896 - DNA, 25 bp, Influenza A
atagttagcttaatgttacaaattg

SEQ ID NO: 4897 - DNA, 21 bp, Influenza A
tggatgctcctaattatcact

SEQ ID NO: 4898 - DNA, 18 bp, Influenza A
gataattggcatggctcg

SEQ ID NO: 4899 - DNA, 21 bp, Influenza A
taatctcaatatgggttagcc

SEQ ID NO: 4900 - DNA, 18 bp, Influenza A
atgctcccacttggaatg

SEQ ID NO: 4901 - DNA, 18 bp, Influenza A
tagcgggcaattcatctc

SEQ ID NO: 4902 - DNA, 18 bp, Influenza A
gagtctgttgcttggtca

SEQ ID NO: 4903 - DNA, 18 bp, Influenza A
tctcacttggaatgcagg

SEQ ID NO: 4904 - DNA, 22 bp, Influenza A
gatcaatctgtatggtaactgg

SEQ ID NO: 4905 - DNA, 20 bp, Influenza A
gtggatgggctatatacagc

SEQ ID NO: 4906 - DNA, 22 bp, Influenza A
agatcttcaaaatggaaaaagg

SEQ ID NO: 4907 - DNA, 21 bp, Influenza A
gatcaatctgtatggtagtcg

SEQ ID NO: 4908 - DNA, 20 bp, Influenza A
gtgtttgtcataagagagcc

SEQ ID NO: 4909 - DNA, 24 bp, Influenza A
aatattatctcaatatgggtcagc

SEQ ID NO: 4910 - DNA, 18 bp, Influenza A
ttcatctcatgctcccac

SEQ ID NO: 4911 - DNA, 18 bp, Influenza A
cgtcaaagacagaagccc

SEQ ID NO: 4912 - DNA, 19 bp, Influenza A
ctgacggaccaagtaatgg

SEQ ID NO: 4913 - DNA, 23 bp, Influenza A
gttagcttaatgttacaaattgg

SEQ ID NO: 4914 - DNA, 18 bp, Influenza A
gagtctgttgcttggtcg

SEQ ID NO: 4915 - DNA, 19 bp, Influenza A
gcaggcaattcatctcttt

SEQ ID NO: 4916 - DNA, 22 bp, Influenza A
tacagtaaggacaacagtataa

SEQ ID NO: 4917 - DNA, 18 bp, Influenza A
ctcacttggaatgcagga

SEQ ID NO: 4918 - DNA, 20 bp, Influenza A
tcaagagttggaggaataac

SEQ ID NO: 4919 - DNA, 18 bp, Influenza A
catctcatgctcccactt

SEQ ID NO: 4920 - DNA, 25 bp, Influenza A
tattacaaattggaaacataatctc

SEQ ID NO: 4921 - DNA, 18 bp, Influenza A
tgctctcacttggaatgc

SEQ ID NO: 4922 - DNA, 23 bp, Influenza A
gaattgaatgctcctaattatca

SEQ ID NO: 4923 - DNA, 19 bp, Influenza A
gatcgggagaaccaaaagc

SEQ ID NO: 4924 - DNA, 21 bp, Influenza A
ttaaatcagtcgaattggatg

SEQ ID NO: 4925 - DNA, 17 bp, Influenza A
gcgggcaattcatctct

SEQ ID NO: 4926 - DNA, 21 bp, Influenza A
atcaatctgtatggtagttgg

SEQ ID NO: 4927 - DNA, 19 bp, Influenza A
gggggatgtgtttgttatt

SEQ ID NO: 4928 - DNA, 23 bp, Influenza A
atagttagcttgatgttacaaat

SEQ ID NO: 4929 - DNA, 19 bp, Influenza A
tgtaaatggctcttgcttt

SEQ ID NO: 4930 - DNA, 22 bp, Influenza A
tagcttaatgttacaaattggg

SEQ ID NO: 4931 - DNA, 23 bp, Influenza A
aattcatctctttgttctatcag

SEQ ID NO: 4932 - DNA, 21 bp, Influenza A
gaaaaagggaaagtggttaaa

SEQ ID NO: 4933 - DNA, 19 bp, Influenza A
attcatctcatgctcccat

SEQ ID NO: 4934 - DNA, 20 bp, Influenza A
aaggggatgtgtttgttatg

SEQ ID NO: 4935 - DNA, 19 bp, Influenza A
gaccgtcaaagacagaagc

SEQ ID NO: 4936 - DNA, 18 bp, Influenza A
ttggcatggctcaaatcg

SEQ ID NO: 4937 - DNA, 23 bp, Influenza A
tacaaattggaaacataatctca

SEQ ID NO: 4938 - DNA, 21 bp, Influenza A
aaaagggaaagtggttaaatc

SEQ ID NO: 4939 - DNA, 18 bp, Influenza A
tggctcttgctttactgt

SEQ ID NO: 4940 - DNA, 23 bp, Influenza A
aatagttagcttgatgttacaaa

SEQ ID NO: 4941 - DNA, 23 bp, Influenza A
atctgtatggtaattggaatagt

SEQ ID NO: 4942 - DNA, 18 bp, Influenza A
caagggggatgtgtttgt

SEQ ID NO: 4943 - DNA, 18 bp, Influenza A
tcatgctctcacttggaa

SEQ ID NO: 4944 - DNA, 19 bp, Influenza A
tcttgttatcctgatgccg

SEQ ID NO: 4945 - DNA, 21 bp, Influenza A
ttgatgttacaaattgggaac

SEQ ID NO: 4946 - DNA, 18 bp, Influenza A
cacttggaatgcaggacc

SEQ ID NO: 4947 - DNA, 25 bp, Influenza A
gatgttacaaattggaaatataatc

SEQ ID NO: 4948 - DNA, 21 bp, Influenza A
taaagacagaagcccttatag

SEQ ID NO: 4949 - DNA, 24 bp, Influenza A
catattatcactatgaggaatgtt

SEQ ID NO: 4950 - DNA, 22 bp, Influenza A
ttaatgttacaaattgggaact

SEQ ID NO: 4951 - DNA, 16 bp, Influenza A
aatccacgccccaatg

SEQ ID NO: 4952 - DNA, 18 bp, Influenza A
gttcatctcatgctccca

SEQ ID NO: 4953 - DNA, 21 bp, Influenza A
ggtcaatctgtatggtaattg

SEQ ID NO: 4954 - DNA, 21 bp, Influenza A
atcaatctgtatggtagtcgg

SEQ ID NO: 4955 - DNA, 21 bp, Influenza A
tcatctctttgccctattagt

SEQ ID NO: 4956 - DNA, 23 bp, Influenza A
ctattagtggatgggctatatac

SEQ ID NO: 4957 - DNA, 19 bp, Influenza A
gtaacattagcgggcaatt

SEQ ID NO: 4958 - DNA, 23 bp, Influenza A
ggttagcttaatgttacaaattg

SEQ ID NO: 4959 - DNA, 23 bp, Influenza A
ataatctcaatatgggttactca

SEQ ID NO: 4960 - DNA, 20 bp, Influenza A
ctccccatataactcaaggt

SEQ ID NO: 4961 - DNA, 21 bp, Influenza A
atcaatctgtatggtaactgg

SEQ ID NO: 4962 - DNA, 18 bp, Influenza A
ggccatgggtatctttca

SEQ ID NO: 4963 - DNA, 25 bp, Influenza A
gttacaaattggaaacataatatca

SEQ ID NO: 4964 - DNA, 23 bp, Influenza A
ttataagagaaccattcatctca

SEQ ID NO: 4965 - DNA, 18 bp, Influenza A
tgcatgtgtaaatggctc

SEQ ID NO: 4966 - DNA, 20 bp, Influenza A
agtggatgggctatatacac

SEQ ID NO: 4967 - DNA, 24 bp, Influenza A
ataattagcttgatgttacaaatt

SEQ ID NO: 4968 - DNA, 20 bp, Influenza A
cagtggatgggctatataca

SEQ ID NO: 4969 - DNA, 21 bp, Influenza A
tatatacagtaaggacaacgg

SEQ ID NO: 4970 - DNA, 21 bp, Influenza A
ggggatgtgtttgttattaga

SEQ ID NO: 4971 - DNA, 18 bp, Influenza A
accgtcaaagacagaagc

SEQ ID NO: 4972 - DNA, 23 bp, Influenza A
gatcaatctgtatgataattgga

SEQ ID NO: 4973 - DNA, 18 bp, Influenza A
acattagcgggcaattcc

SEQ ID NO: 4974 - DNA, 19 bp, Influenza A
ttcatctcatgctcccatt

SEQ ID NO: 4975 - DNA, 19 bp, Influenza A
cagttggttgacaattgga

SEQ ID NO: 4976 - DNA, 20 bp, Influenza A
gtgtaaatggttcttgcttt

SEQ ID NO: 4977 - DNA, 17 bp, Influenza A
tcggagacaatccacgc

SEQ ID NO: 4978 - DNA, 20 bp, Influenza A
cctccccatataactcaagg

SEQ ID NO: 4979 - DNA, 22 bp, Influenza A
acaaattggaaacataatctca

SEQ ID NO: 4980 - DNA, 19 bp, Influenza A
ggctttgaaatgatttggg

SEQ ID NO: 4981 - DNA, 21 bp, Influenza A
tcagcttgatgttacaaattg

SEQ ID NO: 4982 - DNA, 21 bp, Influenza A
agaactttctttttgactcag

SEQ ID NO: 4983 - DNA, 21 bp, Influenza A
aactttctttttgactcaggg

SEQ ID NO: 4984 - DNA, 18 bp, Influenza A
ccgttcatctcatgctcc

SEQ ID NO: 4985 - DNA, 18 bp, Influenza A
gtcaaagacagaagccct

SEQ ID NO: 4986 - DNA, 24 bp, Influenza A
aattttacaaattgggaacataat

SEQ ID NO: 4987 - DNA, 26 bp, Influenza A
tatacagtaaagacaatagtataaga

SEQ ID NO: 4988 - DNA, 19 bp, Influenza A
ctaagggggatgtgtttgt

SEQ ID NO: 4989 - DNA, 15 bp, Influenza A
aatggggctgtggct

SEQ ID NO: 4990 - DNA, 18 bp, Influenza A
cgaggtttgagtctgttg

SEQ ID NO: 4991 - DNA, 18 bp, Influenza A
aaatcggccatgggtatc

SEQ ID NO: 4992 - DNA, 24 bp, Influenza A
ttacaaattgggaatataatctca

SEQ ID NO: 4993 - DNA, 20 bp, Influenza A
ccatacaactcaaggtttga

SEQ ID NO: 4994 - DNA, 20 bp, Influenza A
gtaaaattagcgggcaattc

SEQ ID NO: 4995 - DNA, 20 bp, Influenza A
aagacagaagcccttataga

SEQ ID NO: 4996 - DNA, 20 bp, Influenza A
taaaattagcgggcaattca

SEQ ID NO: 4997 - DNA, 19 bp, Influenza A
aagacagaagcccttacag

SEQ ID NO: 4998 - DNA, 22 bp, Influenza A
ttgatattacaaattgggaaca

SEQ ID NO: 4999 - DNA, 18 bp, Influenza A
attagcgggcaattcctc

SEQ ID NO: 5000 - DNA, 21 bp, Influenza A
gggatgtgtttgttattagag

SEQ ID NO: 5001 - DNA, 20 bp, Influenza A
cccatacaactcaaggtttg

SEQ ID NO: 5002 - DNA, 19 bp, Influenza A
atgctcccatttggaatgc

SEQ ID NO: 5003 - DNA, 19 bp, Influenza A
cgtggatgggctatataca

SEQ ID NO: 5004 - DNA, 21 bp, Influenza A
gttacaaattgggaacatgat

SEQ ID NO: 5005 - DNA, 19 bp, Influenza A
tattagccggcaattcatc

SEQ ID NO: 5006 - DNA, 19 bp, Influenza A
atggaaaaagggaaagtgg

SEQ ID NO: 5007 - DNA, 22 bp, Influenza A
tggattagtcattcaattcaga

SEQ ID NO: 5008 - DNA, 16 bp, Influenza A
gacaatccacgcccca

SEQ ID NO: 5009 - DNA, 16 bp, Influenza A
agacaatccacgcccc

SEQ ID NO: 5010 - DNA, 21 bp, Influenza A
tcaatctgtatggtaatcgga

SEQ ID NO: 5011 - DNA, 21 bp, Influenza A
agggagatgtgtttgttataa

SEQ ID NO: 5012 - DNA, 22 bp, Influenza A
atcagcaataccaattttctta

SEQ ID NO: 5013 - DNA, 18 bp, Influenza A
tcaaagacagaagccctt

SEQ ID NO: 5014 - DNA, 22 bp, Influenza A
gatgtgtttgttatgagagaac

SEQ ID NO: 5015 - DNA, 16 bp, Influenza A
caatccacgccccaat

SEQ ID NO: 5016 - DNA, 18 bp, Influenza A
aatgggaccgtcaaagac

SEQ ID NO: 5017 - DNA, 23 bp, Influenza A
tatggtaattggaatagttagct

SEQ ID NO: 5018 - DNA, 19 bp, Influenza A
cttcagtaacattagcggg

SEQ ID NO: 5019 - DNA, 19 bp, Influenza A
ttcagtaacattagcgggc

SEQ ID NO: 5020 - DNA, 19 bp, Influenza A
ggcttcagtaacattagcg

SEQ ID NO: 5021 - DNA, 22 bp, Influenza A
ataagagagccatttatctcat

SEQ ID NO: 5022 - DNA, 20 bp, Influenza A
ggatcaatctgtatggcaat

SEQ ID NO: 5023 - DNA, 20 bp, Influenza A
ttctttttgactcagggagc

SEQ ID NO: 5024 - DNA, 20 bp, Influenza A
tttctttttgactcagggag

SEQ ID NO: 5025 - DNA, 17 bp, Influenza A
tggcatggctcaaatcg

SEQ ID NO: 5026 - DNA, 20 bp, Influenza A
ctttctttttgactcaggga

SEQ ID NO: 5027 - DNA, 20 bp, Influenza A
actttctttttgactcaggg

SEQ ID NO: 5028 - DNA, 17 bp, Influenza A
gcagtggagttttcgga

SEQ ID NO: 5029 - DNA, 21 bp, Influenza A
caatctgtatggtaactggaa

SEQ ID NO: 5030 - DNA, 19 bp, Influenza A
cctttcatctcatgctccc

SEQ ID NO: 5031 - DNA, 20 bp, Influenza A
gggatgtgtttgttatgaga

SEQ ID NO: 5032 - DNA, 23 bp, Influenza A
caataccaattttcttactgaga

SEQ ID NO: 5033 - DNA, 18 bp, Influenza A
gacagaagcccttacaga

SEQ ID NO: 5034 - DNA, 20 bp, Influenza A
gatctcaatatgggtcagtc

SEQ ID NO: 5035 - DNA, 22 bp, Influenza A
ctgtagcttcagtaacattagc

SEQ ID NO: 5036 - DNA, 22 bp, Influenza A
ctgtatggtaattggaatagtc

SEQ ID NO: 5037 - DNA, 21 bp, Influenza A
tgggctatatacagtaaggat

SEQ ID NO: 5038 - DNA, 23 bp, Influenza A
agggaatattatctcaatatggg

SEQ ID NO: 5039 - DNA, 18 bp, Influenza A
gagcggctttgaaatgat

SEQ ID NO: 5040 - DNA, 21 bp, Influenza A
atgatctcaatatgggtcagt

SEQ ID NO: 5041 - DNA, 21 bp, Influenza A
atgggttagtcattcaattca

SEQ ID NO: 5042 - DNA, 22 bp, Influenza A
cagcaataccaattttcttact

SEQ ID NO: 5043 - DNA, 18 bp, Influenza A
ggttccaaaggggatgtg

SEQ ID NO: 5044 - DNA, 23 bp, Influenza A
tggaaatataatctcaatatggg

SEQ ID NO: 5045 - DNA, 18 bp, Influenza A
gcatccagaactgacagg

SEQ ID NO: 5046 - DNA, 21 bp, Influenza A
actagtggatgggctatatac

SEQ ID NO: 5047 - DNA, 22 bp, Influenza A
cagtaaggacaacagtataagg

SEQ ID NO: 5048 - DNA, 19 bp, Influenza A
atctcatgctcccatttgg

SEQ ID NO: 5049 - DNA, 23 bp, Influenza A
atcaatctgtatgataattggaa

SEQ ID NO: 5050 - DNA, 21 bp, Influenza A
ttgatctcaatatgggtcagt

SEQ ID NO: 5051 - DNA, 25 bp, Influenza A
aggaaatataatctcaatatggatt

SEQ ID NO: 5052 - DNA, 18 bp, Influenza A
ttccaaaggggatgtgtt

SEQ ID NO: 5053 - DNA, 21 bp, Influenza A
cagtcattcaattcagacaga

SEQ ID NO: 5054 - DNA, 19 bp, Influenza A
aattagcgggcaattcttc

SEQ ID NO: 5055 - DNA, 20 bp, Influenza A
gggtcaatctgtatggtagt

SEQ ID NO: 5056 - DNA, 24 bp, Influenza A
gtaattggaatagttagcttaatg

SEQ ID NO: 5057 - DNA, 23 bp, Influenza A
agcaatactaattttcttactga

SEQ ID NO: 5058 - DNA, 20 bp, Influenza A
gtcaatctgtatggtagtcg

SEQ ID NO: 5059 - DNA, 22 bp, Influenza A
atggtaattggaatagttagct

SEQ ID NO: 5060 - DNA, 21 bp, Influenza A
gatcaatctgtatggcaatcg

SEQ ID NO: 5061 - DNA, 23 bp, Influenza A
cagcaatactaattttcttactg

SEQ ID NO: 5062 - DNA, 21 bp, Influenza A
catgatctcaatatgggtcag

SEQ ID NO: 5063 - DNA, 23 bp, Influenza A
tatctttgtgtggtgtaaatagt

SEQ ID NO: 5064 - DNA, 19 bp, Influenza A
attcatttcatgctcccac

SEQ ID NO: 5065 - DNA, 20 bp, Influenza A
ttcttactgagaaagctgtg

SEQ ID NO: 5066 - DNA, 18 bp, Influenza A
ctcccatttggaatgcag

SEQ ID NO: 5067 - DNA, 20 bp, Influenza A
ataagaccttgtttctgggt

SEQ ID NO: 5068 - DNA, 19 bp, Influenza A
tctttttgactcagggagc

SEQ ID NO: 5069 - DNA, 21 bp, Influenza A
agtaaggacaacggtataagg

SEQ ID NO: 5070 - DNA, 20 bp, Influenza A
gtataaggatcggttccaag

SEQ ID NO: 5071 - DNA, 21 bp, Influenza A
ggttagtcattcaattcagac

SEQ ID NO: 5072 - DNA, 21 bp, Influenza A
tgggttagtcattcaattcag

SEQ ID NO: 5073 - DNA, 18 bp, Influenza A
tcccatttggaatgcaga

SEQ ID NO: 5074 - DNA, 19 bp, Influenza A
ttcatctcatgctctcact

SEQ ID NO: 5075 - DNA, 23 bp, Influenza A
caatcagcaatactaattttctt

SEQ ID NO: 5076 - DNA, 18 bp, Influenza A
gagccattcatctcatgc

SEQ ID NO: 5077 - DNA, 20 bp, Influenza A
ttagtggatgggctgtatac

SEQ ID NO: 5078 - DNA, 24 bp, Influenza A
tatggtaattggaataattagctt

SEQ ID NO: 5079 - DNA, 20 bp, Influenza A
tgatctcaatatgggtcagc

SEQ ID NO: 5080 - DNA, 18 bp, Influenza A
tcatgctcccatttggaa

SEQ ID NO: 5081 - DNA, 22 bp, Influenza A
gttggaagaataacatactgag

SEQ ID NO: 5082 - DNA, 21 bp, Influenza A
gggttagtcattcaattcaga

SEQ ID NO: 5083 - DNA, 23 bp, Influenza A
ccaatcagcaatactaattttct

SEQ ID NO: 5084 - DNA, 23 bp, Influenza A
gtcaatctgtatgataattggaa

SEQ ID NO: 5085 - DNA, 19 bp, Influenza A
atgaaattagcgggcaatt

SEQ ID NO: 5086 - DNA, 20 bp, Influenza A
taatctcaatatgggccagt

SEQ ID NO: 5087 - DNA, 20 bp, Influenza A
tataagagagccgttcatct

SEQ ID NO: 5088 - DNA, 21 bp, Influenza A
ccaatcagcaataccaatttt

SEQ ID NO: 5089 - DNA, 17 bp, Influenza A
ccaaagacagaagccct

SEQ ID NO: 5090 - DNA, 21 bp, Influenza A
cagaacattgatgagttgtcc

SEQ ID NO: 5091 - DNA, 24 bp, Influenza A
aatagttagcttaatgttacaagt

SEQ ID NO: 5092 - DNA, 22 bp, Influenza A
ttacagaacattgatgagttgt

SEQ ID NO: 5093 - DNA, 20 bp, Influenza A
tgtggcttcagtaacattag

SEQ ID NO: 5094 - DNA, 24 bp, Influenza A
gaatagttagcttaatgttacaga

SEQ ID NO: 5095 - DNA, 19 bp, Influenza A
catctctttgccccattaa

SEQ ID NO: 5096 - DNA, 17 bp, Influenza A
catggctcaaatcggcc

SEQ ID NO: 5097 - DNA, 21 bp, Influenza A
gtgggttagtcattcaattca

SEQ ID NO: 5098 - DNA, 23 bp, Influenza A
ggaaacataatatcaatatgggt

SEQ ID NO: 5099 - DNA, 18 bp, Influenza A
ctcatgctcccatttgga

SEQ ID NO: 5100 - DNA, 23 bp, Influenza A
tatatacagtaaggacaatggta

SEQ ID NO: 5101 - DNA, 21 bp, Influenza A
atatgggtcagtcattcaatt

SEQ ID NO: 5102 - DNA, 19 bp, Influenza A
cttactgagaaagctgtgg

SEQ ID NO: 5103 - DNA, 20 bp, Influenza A
ttctttttgactcagggatt

SEQ ID NO: 5104 - DNA, 23 bp, Influenza A
acataatctcaatatggattagc

SEQ ID NO: 5105 - DNA, 21 bp, Influenza A
aatatgggtcagtcattcaat

SEQ ID NO: 5106 - DNA, 20 bp, Influenza A
ttcaattcagacagggaatc

SEQ ID NO: 5107 - DNA, 19 bp, Influenza A
ataaggatcggttccaagg

SEQ ID NO: 5108 - DNA, 20 bp, Influenza A
gtgaaatcagtcgaattgga

SEQ ID NO: 5109 - DNA, 22 bp, Influenza A
agaactttctttttaactcagg

SEQ ID NO: 5110 - DNA, 25 bp, Influenza A
aattggaaacataatatcaatatgg

SEQ ID NO: 5111 - DNA, 16 bp, Influenza A
gacaatggggctgtgg

SEQ ID NO: 5112 - DNA, 20 bp, Influenza A
caatctgtatggtagtcgga

SEQ ID NO: 5113 - DNA, 19 bp, Influenza A
atctctttgccccattagc

SEQ ID NO: 5114 - DNA, 17 bp, Influenza A
tcatgctcccacttgga

SEQ ID NO: 5115 - DNA, 21 bp, Influenza A
cagaaccttctttttgactca

SEQ ID NO: 5116 - DNA, 19 bp, Influenza A
cgtttatctcatgctccca

SEQ ID NO: 5117 - DNA, 21 bp, Influenza A
tgggaacatgatctcaatatg

SEQ ID NO: 5118 - DNA, 21 bp, Influenza A
ttgggaacatgatctcaatat

SEQ ID NO: 5119 - DNA, 21 bp, Influenza A
ttacaaattgggaacatgatc

SEQ ID NO: 5120 - DNA, 21 bp, Influenza A
agtcattcaattcagacaagg

SEQ ID NO: 5121 - DNA, 21 bp, Influenza A
cattcaattcaaacagggaat

SEQ ID NO: 5122 - DNA, 20 bp, Influenza A
cattgatgagttgtcctgtg

SEQ ID NO: 5123 - DNA, 21 bp, Influenza A
attggatgctcctaattatca

SEQ ID NO: 5124 - DNA, 17 bp, Influenza A
ctcccacttggaatgca

SEQ ID NO: 5125 - DNA, 25 bp, Influenza A
ggaatataatctcaatatggattag

SEQ ID NO: 5126 - DNA, 17 bp, Influenza A
caaagacagaagcccct

SEQ ID NO: 5127 - DNA, 17 bp, Influenza A
gctcccacttggaatgc

SEQ ID NO: 5128 - DNA, 18 bp, Influenza A
aatgagttgtcctgtggg

SEQ ID NO: 5129 - DNA, 20 bp, Influenza A
gggtcagtcattcaattcag

SEQ ID NO: 5130 - DNA, 25 bp, Influenza A
ttgatattacaaattggaaacataa

SEQ ID NO: 5131 - DNA, 19 bp, Influenza A
ctccctccccatataactc

SEQ ID NO: 5132 - DNA, 19 bp, Influenza A
attagtggatgggctgtat

SEQ ID NO: 5133 - DNA, 21 bp, Influenza A
accattggatcaatcagtatg

SEQ ID NO: 5134 - DNA, 20 bp, Influenza A
tacagtaaggacaacggtat

SEQ ID NO: 5135 - DNA, 20 bp, Influenza A
aacattgatgagttgtcctg

SEQ ID NO: 5136 - DNA, 19 bp, Influenza A
ggtataaggatcggttcca

SEQ ID NO: 5137 - DNA, 20 bp, Influenza A
ggtcagtcattcaattcaga

SEQ ID NO: 5138 - DNA, 18 bp, Influenza A
agtggatgggctgtatac

SEQ ID NO: 5139 - DNA, 19 bp, Influenza A
ataagagagccgttcatct

SEQ ID NO: 5140 - DNA, 25 bp, Influenza A
gaatataatctcaatatggattagc

SEQ ID NO: 5141 - DNA, 22 bp, Influenza A
cattcaattcagacagagaatc

SEQ ID NO: 5142 - DNA, 22 bp, Influenza A
aataccaattttcttactgagc

SEQ ID NO: 5143 - DNA, 21 bp, Influenza A
tatggcttcagtaacattagc

SEQ ID NO: 5144 - DNA, 27 bp, Influenza A
tgatattacaaattggaaatataatct

SEQ ID NO: 5145 - DNA, 18 bp, Influenza A
ttcaaatgggaccgtcaa

SEQ ID NO: 5146 - DNA, 21 bp, Influenza A
taatctcaatatgggctagtc

SEQ ID NO: 5147 - DNA, 20 bp, Influenza A
attaaagacagaagcccaca

SEQ ID NO: 5148 - DNA, 19 bp, Influenza A
tccctccccatataactca

SEQ ID NO: 5149 - DNA, 20 bp, Influenza A
cacagtaaggacaacagtat

SEQ ID NO: 5150 - DNA, 19 bp, Influenza A
ccctccccatataactcaa

SEQ ID NO: 5151 - DNA, 20 bp, Influenza A
tgtgtttgttgtaagagagc

SEQ ID NO: 5152 - DNA, 21 bp, Influenza A
actttctttttaactcaggga

SEQ ID NO: 5153 - DNA, 20 bp, Influenza A
caatatgggtcagtcattca

SEQ ID NO: 5154 - DNA, 20 bp, Influenza A
caaatcaaggtttgagtctg

SEQ ID NO: 5155 - DNA, 20 bp, Influenza A
atgggtcagtcattcaattc

SEQ ID NO: 5156 - DNA, 24 bp, Influenza A
aatagttagcttaatgttacagat

SEQ ID NO: 5157 - DNA, 18 bp, Influenza A
cattagtggatgggctgt

SEQ ID NO: 5158 - DNA, 17 bp, Influenza A
cttggtcagcaagtgct

SEQ ID NO: 5159 - DNA, 20 bp, Influenza A
cacagaacattgatgagttg

SEQ ID NO: 5160 - DNA, 18 bp, Influenza A
taaggatcggttccaagg

SEQ ID NO: 5161 - DNA, 19 bp, Influenza A
ttccaagggggatgtattt

SEQ ID NO: 5162 - DNA, 20 bp, Influenza A
cttcagtaaaattagcgggc

SEQ ID NO: 5163 - DNA, 21 bp, Influenza A
catcagcaataccaattttgt

SEQ ID NO: 5164 - DNA, 23 bp, Influenza A
attagtggatggactatatacag

SEQ ID NO: 5165 - DNA, 20 bp, Influenza A
tgtacacagtaaggacaacg

SEQ ID NO: 5166 - DNA, 20 bp, Influenza A
atgcagaaccttctttttga

SEQ ID NO: 5167 - DNA, 25 bp, Influenza A
atactaaatttcttactgagaaagc

SEQ ID NO: 5168 - DNA, 18 bp, Influenza A
tactgagaaagctgtggc

SEQ ID NO: 5169 - DNA, 19 bp, Influenza A
ctctttgccccattagtgg

SEQ ID NO: 5170 - DNA, 17 bp, Influenza A
agcaagtgcttgccatg

SEQ ID NO: 5171 - DNA, 21 bp, Influenza A
gcaaattgggaacataatctc

SEQ ID NO: 5172 - DNA, 17 bp, Influenza A
gtgctcccacttggaat

SEQ ID NO: 5173 - DNA, 17 bp, Influenza A
tggtcagcaagtgcttg

SEQ ID NO: 5174 - DNA, 17 bp, Influenza A
tgagttgtcctgtgggt

SEQ ID NO: 5175 - DNA, 17 bp, Influenza A
gagttgtcctgtgggtg

SEQ ID NO: 5176 - DNA, 17 bp, Influenza A
agttgtcctgtgggtga

SEQ ID NO: 5177 - DNA, 24 bp, Influenza A
atagggaatataatctcaatatgg

SEQ ID NO: 5178 - DNA, 23 bp, Influenza A
agggaatataatctcaatatgga

SEQ ID NO: 5179 - DNA, 19 bp, Influenza A
ccttctttttgactcaggg

SEQ ID NO: 5180 - DNA, 18 bp, Influenza A
aagaatcggttccaaggg

SEQ ID NO: 5181 - DNA, 19 bp, Influenza A
atcaacaccaagctgaacc

SEQ ID NO: 5182 - DNA, 17 bp, Influenza A
gttgtcctgtgggtgag

SEQ ID NO: 5183 - DNA, 20 bp, Influenza A
tacacagtaaggacaacagt

SEQ ID NO: 5184 - DNA, 20 bp, Influenza A
aacaaccattggatcaatct

SEQ ID NO: 5185 - DNA, 19 bp, Influenza A
tccaagggagatgtgtttg

SEQ ID NO: 5186 - DNA, 17 bp, Influenza A
ttgtcctgtgggtgagg

SEQ ID NO: 5187 - DNA, 18 bp, Influenza A
gctgtggcttcagtaaca

SEQ ID NO: 5188 - DNA, 20 bp, Influenza A
ggtcagtcattcaattcaca

SEQ ID NO: 5189 - DNA, 22 bp, Influenza A
attttcttactgaaaaagctgt

SEQ ID NO: 5190 - DNA, 18 bp, Influenza A
cgtgaaagacagaagccc

SEQ ID NO: 5191 - DNA, 20 bp, Influenza A
aattgggaacatgatctcaa

SEQ ID NO: 5192 - DNA, 19 bp, Influenza A
agtgggtgggctatataca

SEQ ID NO: 5193 - DNA, 19 bp, Influenza A
accgttaaagacagaagcc

SEQ ID NO: 5194 - DNA, 19 bp, Influenza A
cagacagggaatcaacacc

SEQ ID NO: 5195 - DNA, 21 bp, Influenza A
tcagcaataccaattttctca

SEQ ID NO: 5196 - DNA, 18 bp, Influenza A
gctccctccccatataac

SEQ ID NO: 5197 - DNA, 23 bp, Influenza A
taattggaatagttagcttgatg

SEQ ID NO: 5198 - DNA, 18 bp, Influenza A
tcgggagaacaaaaagca

SEQ ID NO: 5199 - DNA, 17 bp, Influenza A
gccccaatgatggaaca

SEQ ID NO: 5200 - DNA, 17 bp, Influenza A
ttgactcagggagcctt

SEQ ID NO: 5201 - DNA, 19 bp, Influenza A
ttcatttcatgctcccact

SEQ ID NO: 5202 - DNA, 21 bp, Influenza A
ttagccattcaattcagactg

SEQ ID NO: 5203 - DNA, 24 bp, Influenza A
aacatcagcaatactaattttatt

SEQ ID NO: 5204 - DNA, 17 bp, Influenza A
ttttgactcagggagcc

SEQ ID NO: 5205 - DNA, 18 bp, Influenza A
acattagccggcaattca

SEQ ID NO: 5206 - DNA, 21 bp, Influenza A
atgcagaacattctttttgac

SEQ ID NO: 5207 - DNA, 19 bp, Influenza A
acacagtaaggacaacagt

SEQ ID NO: 5208 - DNA, 24 bp, Influenza A
actatcatagagaaagagatttgt

SEQ ID NO: 5209 - DNA, 20 bp, Influenza A
ttttaatgaacgagttgggt

SEQ ID NO: 5210 - DNA, 21 bp, Influenza A
caatatgaatgcaactacccc

SEQ ID NO: 5211 - DNA, 20 bp, Influenza A
atttcaagcaaaatgagtgc

SEQ ID NO: 5212 - DNA, 19 bp, Influenza A
aggacaactcaattcgact

SEQ ID NO: 5213 - DNA, 20 bp, Influenza A
tagaatccctcatagaaccc

SEQ ID NO: 5214 - DNA, 19 bp, Influenza A
accacactagacaacaaac

SEQ ID NO: 5215 - DNA, 19 bp, Influenza A
agaattggtcaaaaccaca

SEQ ID NO: 5216 - DNA, 23 bp, Influenza A
acggaaatagtgtatttgaataa

SEQ ID NO: 5217 - DNA, 18 bp, Influenza A
ggacacatttgggtgaca

SEQ ID NO: 5218 - DNA, 19 bp, Influenza A
ccacactagacaacaaaca

SEQ ID NO: 5219 - DNA, 21 bp, Influenza A
agtgtcaaattacaggacttg

SEQ ID NO: 5220 - DNA, 20 bp, Influenza A
tagaattcctcatcgaaccc

SEQ ID NO: 5221 - DNA, 21 bp, Influenza A
aataatcaagtagtgccatgt

SEQ ID NO: 5222 - DNA, 16 bp, Influenza A
tttctgctggtgggga

SEQ ID NO: 5223 - DNA, 19 bp, Influenza A
ggtcaaaaccacaatgtca

SEQ ID NO: 5224 - DNA, 20 bp, Influenza A
ttaagcaatatgagtgcgac

SEQ ID NO: 5225 - DNA, 19 bp, Influenza A
aggaattggtcaaaacctc

SEQ ID NO: 5226 - DNA, 21 bp, Influenza A
actttgaacaacaaacattca

SEQ ID NO: 5227 - DNA, 20 bp, Influenza A
atttcaagcagaatgaatgc

SEQ ID NO: 5228 - DNA, 18 bp, Influenza A
ttaggctttctgctggtg

SEQ ID NO: 5229 - DNA, 18 bp, Influenza A
cacactggacaacaaaca

SEQ ID NO: 5230 - DNA, 17 bp, Influenza A
gtgccatgtgaaccagc

SEQ ID NO: 5231 - DNA, 20 bp, Influenza A
ataaccaagtagtgccatgt

SEQ ID NO: 5232 - DNA, 18 bp, Influenza A
tgatcctggcaagtgtta

SEQ ID NO: 5233 - DNA, 18 bp, Influenza A
ccctcatcgaaccctttt

SEQ ID NO: 5234 - DNA, 20 bp, Influenza A
tttcaagcagaatgaatgca

SEQ ID NO: 5235 - DNA, 19 bp, Influenza A
gatcctggcaagtgttacc

SEQ ID NO: 5236 - DNA, 21 bp, Influenza A
tcaaaaccacaatgtcaaatc

SEQ ID NO: 5237 - DNA, 20 bp, Influenza A
gctctgtttctctaaccatt

SEQ ID NO: 5238 - DNA, 21 bp, Influenza A
gaatcaaacaagtgtgcatag

SEQ ID NO: 5239 - DNA, 18 bp, Influenza A
ggaccacactagacaaca

SEQ ID NO: 5240 - DNA, 19 bp, Influenza A
ctcactattgccacaatgt

SEQ ID NO: 5241 - DNA, 19 bp, Influenza A
tagaatccctcatcggacc

SEQ ID NO: 5242 - DNA, 15 bp, Influenza A
ggcaggggaccacgc

SEQ ID NO: 5243 - DNA, 17 bp, Influenza A
cagtttgcacttgggca

SEQ ID NO: 5244 - DNA, 18 bp, Influenza A
caaggacaactcaatccg

SEQ ID NO: 5245 - DNA, 22 bp, Influenza A
atacatgataggattcctcatc

SEQ ID NO: 5246 - DNA, 24 bp, Influenza A
atagtgcatttgaataatactacc

SEQ ID NO: 5247 - DNA, 17 bp, Influenza A
gcagattgccatcctgg

SEQ ID NO: 5248 - DNA, 21 bp, Influenza A
tacaagaattggtcaaaacca

SEQ ID NO: 5249 - DNA, 22 bp, Influenza A
caataccaccatagaaaaagag

SEQ ID NO: 5250 - DNA, 18 bp, Influenza A
ggtagtgccatgtgaacc

SEQ ID NO: 5251 - DNA, 20 bp, Influenza A
gcctttgactatggaaatga

SEQ ID NO: 5252 - DNA, 22 bp, Influenza A
ggaacaatacgtgatagaatcc

SEQ ID NO: 5253 - DNA, 19 bp, Influenza A
atagaacccctcatcgaac

SEQ ID NO: 5254 - DNA, 18 bp, Influenza A
accaagtagtgccatgtg

SEQ ID NO: 5255 - DNA, 19 bp, Influenza A
aaaccgcaatgtcaaatca

SEQ ID NO: 5256 - DNA, 20 bp, Influenza A
atgtcaaatcacaggattcg

SEQ ID NO: 5257 - DNA, 20 bp, Influenza A
ttccaaggacaactctattc

SEQ ID NO: 5258 - DNA, 20 bp, Influenza A
gtcaaaaccacaatgtcaga

SEQ ID NO: 5259 - DNA, 18 bp, Influenza A
atcggacccttttgatga

SEQ ID NO: 5260 - DNA, 24 bp, Influenza A
catagtgcatttgaataatactac

SEQ ID NO: 5261 - DNA, 20 bp, Influenza A
cgatcctagcaagtgttatc

SEQ ID NO: 5262 - DNA, 15 bp, Influenza A
tctccgctggtgggg

SEQ ID NO: 5263 - DNA, 19 bp, Influenza A
atgatagaatcccccatcg

SEQ ID NO: 5264 - DNA, 15 bp, Influenza A
ggcaggggaccacct

SEQ ID NO: 5265 - DNA, 18 bp, Influenza A
agaattggtcaaaaccgc

SEQ ID NO: 5266 - DNA, 19 bp, Influenza A
caatcaagtagtgccatgt

SEQ ID NO: 5267 - DNA, 21 bp, Influenza A
tacaagaattggtcaaaaccc

SEQ ID NO: 5268 - DNA, 19 bp, Influenza A
cgcaatgtcaaattaccgg

SEQ ID NO: 5269 - DNA, 17 bp, Influenza A
cgatcctggcaagtgtt

SEQ ID NO: 5270 - DNA, 19 bp, Influenza A
tccaaggacaactcagttc

SEQ ID NO: 5271 - DNA, 18 bp, Influenza A
tctgaccattgcaacagt

SEQ ID NO: 5272 - DNA, 24 bp, Influenza A
atagagaaagagatttgtcttaaa

SEQ ID NO: 5273 - DNA, 19 bp, Influenza A
aggacaactcaattaggct

SEQ ID NO: 5274 - DNA, 20 bp, Influenza A
ccatagagaaagagatctgc

SEQ ID NO: 5275 - DNA, 20 bp, Influenza A
ctctgtgtctctcactattg

SEQ ID NO: 5276 - DNA, 15 bp, Influenza A
tgcacttgggcaggg

SEQ ID NO: 5277 - DNA, 20 bp, Influenza A
catagagaaagagatctgcc

SEQ ID NO: 5278 - DNA, 20 bp, Influenza A
ttttaagcaatatgagtgcg

SEQ ID NO: 5279 - DNA, 18 bp, Influenza A
aaggacaactcaatccga

SEQ ID NO: 5280 - DNA, 22 bp, Influenza A
tttgaataacaccatcatagag

SEQ ID NO: 5281 - DNA, 15 bp, Influenza A
gcaggggaccacact

SEQ ID NO: 5282 - DNA, 20 bp, Influenza A
acaagaattggtcaaaacca

SEQ ID NO: 5283 - DNA, 19 bp, Influenza A
cacgctagacaacaaacac

SEQ ID NO: 5284 - DNA, 17 bp, Influenza A
acaggggaccacactaa

SEQ ID NO: 5285 - DNA, 19 bp, Influenza A
aggaaccacactagacaac

SEQ ID NO: 5286 - DNA, 16 bp, Influenza A
tcatgcgatcctggca

SEQ ID NO: 5287 - DNA, 16 bp, Influenza A
catgcgatcctggcaa

SEQ ID NO: 5288 - DNA, 18 bp, Influenza A
cctcatcgaacccttttg

SEQ ID NO: 5289 - DNA, 22 bp, Influenza A
actacatttcaagcataatgaa

SEQ ID NO: 5290 - DNA, 18 bp, Influenza A
ccacgctagacaacaaac

SEQ ID NO: 5291 - DNA, 19 bp, Influenza A
gtggagacatttgggtaac

SEQ ID NO: 5292 - DNA, 25 bp, Influenza A
tatttgaataacactatcatagaga

SEQ ID NO: 5293 - DNA, 16 bp, Influenza A
tgcgatcctggcaagt

SEQ ID NO: 5294 - DNA, 19 bp, Influenza A
gtgacactgcatttcaagc

SEQ ID NO: 5295 - DNA, 17 bp, Influenza A
atccctcatcgaaccct

SEQ ID NO: 5296 - DNA, 22 bp, Influenza A
cgactataacactacatttcaa

SEQ ID NO: 5297 - DNA, 15 bp, Influenza A
ttctgctggtggggg

SEQ ID NO: 5298 - DNA, 24 bp, Influenza A
aacatagtgcatttgaataatact

SEQ ID NO: 5299 - DNA, 20 bp, Influenza A
cgttcatataagcccattgt

SEQ ID NO: 5300 - DNA, 20 bp, Influenza A
ggctaattccaaatcacagg

SEQ ID NO: 5301 - DNA, 16 bp, Influenza A
gcgatcctggcaagtg

SEQ ID NO: 5302 - DNA, 18 bp, Influenza A
tgacactgcatttcaagc

SEQ ID NO: 5303 - DNA, 22 bp, Influenza A
gacaaatcatagttgacaatga

SEQ ID NO: 5304 - DNA, 16 bp, Influenza A
caggggaccacactgg

SEQ ID NO: 5305 - DNA, 19 bp, Influenza A
tcaagcaatatgagtgcga

SEQ ID NO: 5306 - DNA, 22 bp, Influenza A
actatgacactacatttcaagc

SEQ ID NO: 5307 - DNA, 18 bp, Influenza A
gggacatttgggtaacga

SEQ ID NO: 5308 - DNA, 22 bp, Influenza A
tcctcatagaacccttttaatg

SEQ ID NO: 5309 - DNA, 21 bp, Influenza A
atgtttccttatgcagattgt

SEQ ID NO: 5310 - DNA, 22 bp, Influenza A
aattagtggaatacaggaattg

SEQ ID NO: 5311 - DNA, 19 bp, Influenza A
ggcacaacacatgatagaa

SEQ ID NO: 5312 - DNA, 22 bp, Influenza A
gactatgacactacatttcaag

SEQ ID NO: 5313 - DNA, 19 bp, Influenza A
agcaatgtgaatgcaactc

SEQ ID NO: 5314 - DNA, 21 bp, Influenza A
cactcttgacaacaaacattc

SEQ ID NO: 5315 - DNA, 18 bp, Influenza A
gattaggctttccgctgg

SEQ ID NO: 5316 - DNA, 18 bp, Influenza A
aatgagtgagttgggtgt

SEQ ID NO: 5317 - DNA, 21 bp, Influenza A
gccaatcataatagagaggaa

SEQ ID NO: 5318 - DNA, 24 bp, Influenza A
gaacatagtgcatttgaataatac

SEQ ID NO: 5319 - DNA, 17 bp, Influenza A
agtagtgccatgtgagc

SEQ ID NO: 5320 - DNA, 21 bp, Influenza A
aaatgttatcagtttgcactt

SEQ ID NO: 5321 - DNA, 18 bp, Influenza A
tcaatccgactttctgct

SEQ ID NO: 5322 - DNA, 18 bp, Influenza A
caatccgactttctgctg

SEQ ID NO: 5323 - DNA, 19 bp, Influenza A
tcaagcaatatgagtgcgg

SEQ ID NO: 5324 - DNA, 17 bp, Influenza A
atgcgatcctggcaaat

SEQ ID NO: 5325 - DNA, 22 bp, Influenza A
catagaacccttttaatgaacg

SEQ ID NO: 5326 - DNA, 18 bp, Influenza A
tcccatgtgaaccaatca

SEQ ID NO: 5327 - DNA, 19 bp, Influenza A
atgatagaatccctcaccg

SEQ ID NO: 5328 - DNA, 21 bp, Influenza A
ctaaccattgcaacaatatgt

SEQ ID NO: 5329 - DNA, 22 bp, Influenza A
ttcctcatagaacccttttaat

SEQ ID NO: 5330 - DNA, 18 bp, Influenza A
gggatatttgggtgacga

SEQ ID NO: 5331 - DNA, 18 bp, Influenza A
cgtttcacttgggaacca

SEQ ID NO: 5332 - DNA, 21 bp, Influenza A
attccaagtcacaggtaaata

SEQ ID NO: 5333 - DNA, 18 bp, Influenza A
tgtgtcatgtgatcctgg

SEQ ID NO: 5334 - DNA, 18 bp, Influenza A
ggggatatctgggtgaca

SEQ ID NO: 5335 - DNA, 18 bp, Influenza A
ccgtttcacttgggaacc

SEQ ID NO: 5336 - DNA, 19 bp, Influenza A
agcaatacgaatgcaactc

SEQ ID NO: 5337 - DNA, 19 bp, Influenza A
gggaccacactagataaca

SEQ ID NO: 5338 - DNA, 17 bp, Influenza A
gtgatcctggcaagtgt

SEQ ID NO: 5339 - DNA, 20 bp, Influenza A
gtaatgctgtgtgaaacaac

SEQ ID NO: 5340 - DNA, 18 bp, Influenza A
agggaaccacactagaca

SEQ ID NO: 5341 - DNA, 22 bp, Influenza A
agtgcatttgaataatactacc

SEQ ID NO: 5342 - DNA, 22 bp, Influenza A
ccagtaaatgctatcaatttgc

SEQ ID NO: 5343 - DNA, 21 bp, Influenza A
ctatgacactacatttcaagc

SEQ ID NO: 5344 - DNA, 17 bp, Influenza A
ccctcatcgaacccttc

SEQ ID NO: 5345 - DNA, 18 bp, Influenza A
gggaccacactagacaat

SEQ ID NO: 5346 - DNA, 20 bp, Influenza A
catttgggttacgagagaac

SEQ ID NO: 5347 - DNA, 18 bp, Influenza A
gtggggatatctgggtga

SEQ ID NO: 5348 - DNA, 16 bp, Influenza A
cccctcatcgaaccct

SEQ ID NO: 5349 - DNA, 20 bp, Influenza A
tgacactacatttcaagcag

SEQ ID NO: 5350 - DNA, 25 bp, Influenza A
atgacatgtgaatcaataataatag

SEQ ID NO: 5351 - DNA, 19 bp, Influenza A
aaatggcacaacacatgat

SEQ ID NO: 5352 - DNA, 21 bp, Influenza A
agagatatgccccaaattagt

SEQ ID NO: 5353 - DNA, 20 bp, Influenza A
atttcaagcaacatgagtgc

SEQ ID NO: 5354 - DNA, 21 bp, Influenza A
gaccacactagacaataaaca

SEQ ID NO: 5355 - DNA, 18 bp, Influenza A
atgcgatcctagcaagtg

SEQ ID NO: 5356 - DNA, 18 bp, Influenza A
aggcaagtgtgtatagca

SEQ ID NO: 5357 - DNA, 19 bp, Influenza A
accacactagacaacagac

SEQ ID NO: 5358 - DNA, 21 bp, Influenza A
aggtgaatagacaagtcatag

SEQ ID NO: 5359 - DNA, 22 bp, Influenza A
ctccggtaaatgttatcaattt

SEQ ID NO: 5360 - DNA, 20 bp, Influenza A
gactacaggaattggtcaaa

SEQ ID NO: 5361 - DNA, 22 bp, Influenza A
catagaacccttttaatgagtg

SEQ ID NO: 5362 - DNA, 16 bp, Influenza A
ccggctttctgctggt

SEQ ID NO: 5363 - DNA, 22 bp, Influenza A
ccaatagtaatagagaggaaca

SEQ ID NO: 5364 - DNA, 20 bp, Influenza A
gctaattccaaatcacaggt

SEQ ID NO: 5365 - DNA, 21 bp, Influenza A
atgttatcaattcgcacttgg

SEQ ID NO: 5366 - DNA, 18 bp, Influenza A
tttgccaaggacaactca

SEQ ID NO: 5367 - DNA, 21 bp, Influenza A
ctcctcatagaacccttttaa

SEQ ID NO: 5368 - DNA, 22 bp, Influenza A
aatatgacactacatttcaagc

SEQ ID NO: 5369 - DNA, 19 bp, Influenza A
atgctttctcatgcagatt

SEQ ID NO: 5370 - DNA, 19 bp, Influenza A
tgctttctcatgcagattg

SEQ ID NO: 5371 - DNA, 22 bp, Influenza A
aaccagtaaatgttaccaattt

SEQ ID NO: 5372 - DNA, 21 bp, Influenza A
aatgttatcaattcgcacttg

SEQ ID NO: 5373 - DNA, 16 bp, Influenza A
tttgcactcgggcagg

SEQ ID NO: 5374 - DNA, 16 bp, Influenza A
tcggctttctgctggt

SEQ ID NO: 5375 - DNA, 20 bp, Influenza A
tagtgccatatgaaccaatc

SEQ ID NO: 5376 - DNA, 18 bp, Influenza A
cccccaacaaccaagtaa

SEQ ID NO: 5377 - DNA, 18 bp, Influenza A
aagcaatatgagtgcagc

SEQ ID NO: 5378 - DNA, 21 bp, Influenza A
cccatagaacccttttaatga

SEQ ID NO: 5379 - DNA, 19 bp, Influenza A
ggatttgctcctttttcca

SEQ ID NO: 5380 - DNA, 21 bp, Influenza A
atgacacaatacatgacagaa

SEQ ID NO: 5381 - DNA, 18 bp, Influenza A
ctggtggagacatttgga

SEQ ID NO: 5382 - DNA, 24 bp, Influenza A
gaaatagtgtatttgactaatacc

SEQ ID NO: 5383 - DNA, 17 bp, Influenza A
aacccctcatcgaaccc

SEQ ID NO: 5384 - DNA, 18 bp, Influenza A
tcaggtagtgccatgtga

SEQ ID NO: 5385 - DNA, 23 bp, Influenza A
gaaccaatcataataggaagaaa

SEQ ID NO: 5386 - DNA, 22 bp, Influenza A
tcataggacccttttaatgaat

SEQ ID NO: 5387 - DNA, 17 bp, Influenza A
accaatttgcactcggg

SEQ ID NO: 5388 - DNA, 18 bp, Influenza A
tcaagtagtgccatgtgg

SEQ ID NO: 5389 - DNA, 16 bp, Influenza A
tccggctttctgctgg

SEQ ID NO: 5390 - DNA, 21 bp, Influenza A
ctcgaataatcaagtagtgcc

SEQ ID NO: 5391 - DNA, 19 bp, Influenza A
ggacatctgggtaacaaga

SEQ ID NO: 5392 - DNA, 20 bp, Influenza A
gagatatgccccaaattagt

SEQ ID NO: 5393 - DNA, 19 bp, Influenza A
atttgggaaccagacaagt

SEQ ID NO: 5394 - DNA, 18 bp, Influenza A
ttcgactttctgctggtg

SEQ ID NO: 5395 - DNA, 19 bp, Influenza A
caattcgactttctgctgg

SEQ ID NO: 5396 - DNA, 21 bp, Influenza A
tatgtttcctcttgcagattg

SEQ ID NO: 5397 - DNA, 23 bp, Influenza A
acatgtgaaccaattatagtaga

SEQ ID NO: 5398 - DNA, 19 bp, Influenza A
tcaattcgactttctgctg

SEQ ID NO: 5399 - DNA, 20 bp, Influenza A
ggtggagacatttggataac

SEQ ID NO: 5400 - DNA, 18 bp, Influenza A
catgcttcctcatgcaaa

SEQ ID NO: 5401 - DNA, 18 bp, Influenza A
tggtcaaaaccccaatgt

SEQ ID NO: 5402 - DNA, 18 bp, Influenza A
caaccaagtaacgctgtg

SEQ ID NO: 5403 - DNA, 19 bp, Influenza A
cccctcatagaaccctttt

SEQ ID NO: 5404 - DNA, 21 bp, Influenza A
cggtcttggtaaatgttatca

SEQ ID NO: 5405 - DNA, 20 bp, Influenza A
aatgtcaaatcacagggttc

SEQ ID NO: 5406 - DNA, 21 bp, Influenza A
cgactatgacactacatttca

SEQ ID NO: 5407 - DNA, 20 bp, Influenza A
cctcatagaacccttttgat

SEQ ID NO: 5408 - DNA, 19 bp, Influenza A
ctcaattcgactttctgct

SEQ ID NO: 5409 - DNA, 16 bp, Influenza A
ttcggctttctgctgg

SEQ ID NO: 5410 - DNA, 15 bp, Influenza A
ttgcactcgggcagg

SEQ ID NO: 5411 - DNA, 20 bp, Influenza A
ccatgtggaccaatcataat

SEQ ID NO: 5412 - DNA, 20 bp, Influenza A
tgtatagcatggtctagctc

SEQ ID NO: 5413 - DNA, 19 bp, Influenza A
ttatcagtttgcacttggg

SEQ ID NO: 5414 - DNA, 18 bp, Influenza A
ggtcaaaaccccaatgtc

SEQ ID NO: 5415 - DNA, 19 bp, Influenza A
tcaagcagaatgaatgcac

SEQ ID NO: 5416 - DNA, 18 bp, Influenza A
tgatagaagccctcatcg

SEQ ID NO: 5417 - DNA, 19 bp, Influenza A
agactacaggaattggtca

SEQ ID NO: 5418 - DNA, 25 bp, Influenza A
aataatactaccatagagaagaaaa

SEQ ID NO: 5419 - DNA, 20 bp, Influenza A
acccttttgatgaatgaact

SEQ ID NO: 5420 - DNA, 17 bp, Influenza A
tgggtgacgagagaacc

SEQ ID NO: 5421 - DNA, 21 bp, Influenza A
aacgactatgacactacattt

SEQ ID NO: 5422 - DNA, 19 bp, Influenza A
aggacaattcgattaggct

SEQ ID NO: 5423 - DNA, 21 bp, Influenza A
gcaagccaatcataatagaga

SEQ ID NO: 5424 - DNA, 17 bp, Influenza A
gggtgacgagagaacct

SEQ ID NO: 5425 - DNA, 20 bp, Influenza A
acactacatttcaagcagaa

SEQ ID NO: 5426 - DNA, 19 bp, Influenza A
gaaagagatttgccccaaa

SEQ ID NO: 5427 - DNA, 21 bp, Influenza A
atcgaataatcaagtagtgcc

SEQ ID NO: 5428 - DNA, 19 bp, Influenza A
ggacaattcgattaggctt

SEQ ID NO: 5429 - DNA, 19 bp, Influenza A
caatgtcaaatcacagggt

SEQ ID NO: 5430 - DNA, 17 bp, Influenza A
ttgggctttctgctggt

SEQ ID NO: 5431 - DNA, 19 bp, Influenza A
aagagatatgccccaaagt

SEQ ID NO: 5432 - DNA, 17 bp, Influenza A
tggtggagacatttggg

SEQ ID NO: 5433 - DNA, 19 bp, Influenza A
gaccactgctaattccaaa

SEQ ID NO: 5434 - DNA, 18 bp, Influenza A
ggtgttccgtttcacttg

SEQ ID NO: 5435 - DNA, 21 bp, Influenza A
tgccatatgaaccaatcataa

SEQ ID NO: 5436 - DNA, 19 bp, Influenza A
ccgcaatgtcagattacag

SEQ ID NO: 5437 - DNA, 22 bp, Influenza A
gactatgacactacatttcagg

SEQ ID NO: 5438 - DNA, 18 bp, Influenza A
tttgggaaccagacaagt

SEQ ID NO: 5439 - DNA, 19 bp, Influenza A
ggacatttgggttacgaga

SEQ ID NO: 5440 - DNA, 18 bp, Influenza A
tagcaacgactgtgacac

SEQ ID NO: 5441 - DNA, 17 bp, Influenza A
cgctggtggagacattt

SEQ ID NO: 5442 - DNA, 19 bp, Influenza A
aaggaaccacactagacaa

SEQ ID NO: 5443 - DNA, 20 bp, Influenza A
ctggcaaatgttaccaattt

SEQ ID NO: 5444 - DNA, 19 bp, Influenza A
atgtcaaatcacagggttc

SEQ ID NO: 5445 - DNA, 16 bp, Influenza A
tggtgccatgtgaacc

SEQ ID NO: 5446 - DNA, 20 bp, Influenza A
aaatgctaccaatttgcact

SEQ ID NO: 5447 - DNA, 19 bp, Influenza A
accgcaatgtcagattaca

SEQ ID NO: 5448 - DNA, 21 bp, Influenza A
actacatttcaagcagaatga

SEQ ID NO: 5449 - DNA, 19 bp, Influenza A
ggacaactcaattaggctc

SEQ ID NO: 5450 - DNA, 16 bp, Influenza A
gtgccatgtgaaccga

SEQ ID NO: 5451 - DNA, 20 bp, Influenza A
atgcttcctcattcagattg

SEQ ID NO: 5452 - DNA, 20 bp, Influenza A
gagatatgccccaaagtagt

SEQ ID NO: 5453 - DNA, 20 bp, Influenza A
ttagcaacgactatgacact

SEQ ID NO: 5454 - DNA, 22 bp, Influenza A
aataatcaagtagtgccatatg

SEQ ID NO: 5455 - DNA, 19 bp, Influenza A
agtaataccgtgtgaacca

SEQ ID NO: 5456 - DNA, 19 bp, Influenza A
acgctagacaacaaacact

SEQ ID NO: 5457 - DNA, 21 bp, Influenza A
tttcatttaggaaccagacaa

SEQ ID NO: 5458 - DNA, 17 bp, Influenza A
acatttgggtgacgagg

SEQ ID NO: 5459 - DNA, 21 bp, Influenza A
gacaactcaattaggctttcc

SEQ ID NO: 5460 - DNA, 21 bp, Influenza A
tgacattacatttcaagcagt

SEQ ID NO: 5461 - DNA, 25 bp, Influenza A
aatcataatagagaggaatataacg

SEQ ID NO: 5462 - DNA, 21 bp, Influenza A
aacccttttaatgaacgaatt

SEQ ID NO: 5463 - DNA, 19 bp, Influenza A
caagcagaatgaatgcagc

SEQ ID NO: 5464 - DNA, 18 bp, Influenza A
gtctgtttcctcatgcag

SEQ ID NO: 5465 - DNA, 17 bp, Influenza A
agcagtgccatgtgaac

SEQ ID NO: 5466 - DNA, 18 bp, Influenza A
aagtagtgccatgtggac

SEQ ID NO: 5467 - DNA, 21 bp, Influenza A
gacaactcaattaggctttct

SEQ ID NO: 5468 - DNA, 18 bp, Influenza A
atgtgaatgcaactcccc

SEQ ID NO: 5469 - DNA, 21 bp, Influenza A
tggtcttggtaaatgttatca

SEQ ID NO: 5470 - DNA, 23 bp, Influenza A
aaaaagaaatttgtcctaaagtg

SEQ ID NO: 5471 - DNA, 21 bp, Influenza A
aataattggtctgggtattct

SEQ ID NO: 5472 - DNA, 21 bp, Influenza A
atcacatgatagaactcctca

SEQ ID NO: 5473 - DNA, 20 bp, Influenza A
acaattcgattaggctttcc

SEQ ID NO: 5474 - DNA, 19 bp, Influenza A
accacaatgtcaaatcaca

SEQ ID NO: 5475 - DNA, 19 bp, Influenza A
atttgcccctttttccaat

SEQ ID NO: 5476 - DNA, 21 bp, Influenza A
aagagatatgccccaaaatag

SEQ ID NO: 5477 - DNA, 18 bp, Influenza A
gatttgcccctttttcca

SEQ ID NO: 5478 - DNA, 21 bp, Influenza A
agacatttggataacaagaga

SEQ ID NO: 5479 - DNA, 20 bp, Influenza A
acccttttaatgaacgagtt

SEQ ID NO: 5480 - DNA, 19 bp, Influenza A
aatgctaccaatttgcact

SEQ ID NO: 5481 - DNA, 24 bp, Influenza A
aatactaccatagaaaaagagatt

SEQ ID NO: 5482 - DNA, 18 bp, Influenza A
caacatgagtgcgactcc

SEQ ID NO: 5483 - DNA, 17 bp, Influenza A
tctgctggtggagacat

SEQ ID NO: 5484 - DNA, 19 bp, Influenza A
ggacaattcaatccgactt

SEQ ID NO: 5485 - DNA, 19 bp, Influenza A
ataggatccctcatcgaac

SEQ ID NO: 5486 - DNA, 19 bp, Influenza A
gtggagatatttgggtgac

SEQ ID NO: 5487 - DNA, 19 bp, Influenza A
gcggtcttggtaaatgtta

SEQ ID NO: 5488 - DNA, 19 bp, Influenza A
cgaacaatcaagtagtgcc

SEQ ID NO: 5489 - DNA, 23 bp, Influenza A
taattccaaatcacaggtaaata

SEQ ID NO: 5490 - DNA, 22 bp, Influenza A
ttagtaagtgttaccaatttgc

SEQ ID NO: 5491 - DNA, 20 bp, Influenza A
acaactcaattaggctttcc

SEQ ID NO: 5492 - DNA, 18 bp, Influenza A
ctcaccattgcaacgatg

SEQ ID NO: 5493 - DNA, 23 bp, Influenza A
aattccaaatcacaggtaaatag

SEQ ID NO: 5494 - DNA, 18 bp, Influenza A
ctcaattaggctttccgc

SEQ ID NO: 5495 - DNA, 22 bp, Influenza A
aaacatttggataacaagagaa

SEQ ID NO: 5496 - DNA, 17 bp, Influenza A
catttgggtgacgaggg

SEQ ID NO: 5497 - DNA, 21 bp, Influenza A
gtttctctaactattgcgaca

SEQ ID NO: 5498 - DNA, 21 bp, Influenza A
tttcatttgggaatcaaacaa

SEQ ID NO: 5499 - DNA, 19 bp, Influenza A
gtcaaattacagggttcgc

SEQ ID NO: 5500 - DNA, 24 bp, Influenza A
tatttgactaatacaaccatagaa

SEQ ID NO: 5501 - DNA, 21 bp, Influenza A
catttggataacaagagaacc

SEQ ID NO: 5502 - DNA, 20 bp, Influenza A
acaactcaattaggctttct

SEQ ID NO: 5503 - DNA, 23 bp, Influenza A
aacatagtgcatttgaatagtac

SEQ ID NO: 5504 - DNA, 18 bp, Influenza A
catggtctagctcaagct

SEQ ID NO: 5505 - DNA, 20 bp, Influenza A
agcaacgactataacactgc

SEQ ID NO: 5506 - DNA, 17 bp, Influenza A
aatgccgtgtgaaccaa

SEQ ID NO: 5507 - DNA, 20 bp, Influenza A
gccccaaattagtggaatac

SEQ ID NO: 5508 - DNA, 20 bp, Influenza A
atacaggaattggtcgaaac

SEQ ID NO: 5509 - DNA, 20 bp, Influenza A
attcaaatggcacaaaacat

SEQ ID NO: 5510 - DNA, 21 bp, Influenza A
ttctctaactattgcgacaat

SEQ ID NO: 5511 - DNA, 19 bp, Influenza A
ggcatcttctctgttgaag

SEQ ID NO: 5512 - DNA, 22 bp, Influenza A
aactactgtgacattacatttt

SEQ ID NO: 5513 - DNA, 21 bp, Influenza A
ccaaattagtggaatacagga

SEQ ID NO: 5514 - DNA, 20 bp, Influenza A
aatacaggaattggtcgaaa

SEQ ID NO: 5515 - DNA, 15 bp, Influenza A
actcgggcaggggac

SEQ ID NO: 5516 - DNA, 19 bp, Influenza A
cggagatatttgggtgaca

SEQ ID NO: 5517 - DNA, 19 bp, Influenza A
ggacaacactagacaacag

SEQ ID NO: 5518 - DNA, 21 bp, Influenza A
gaattcctcatagaacccttt

SEQ ID NO: 5519 - DNA, 19 bp, Influenza A
cgactgtaacactgcattt

SEQ ID NO: 5520 - DNA, 21 bp, Influenza A
catttggataacaagagagcc

SEQ ID NO: 5521 - DNA, 20 bp, Influenza A
cctcgaacaatcaagtagtg

SEQ ID NO: 5522 - DNA, 17 bp, Influenza A
tgctggtggagacatct

SEQ ID NO: 5523 - DNA, 18 bp, Influenza A
aagcagaatgaatgcagc

SEQ ID NO: 5524 - DNA, 22 bp, Influenza A
ttgtcctaaagtagcagaatac

SEQ ID NO: 5525 - DNA, 22 bp, Influenza A
gaacatagtgcatttgaatagt

SEQ ID NO: 5526 - DNA, 20 bp, Influenza A
acaattcaatccgactttct

SEQ ID NO: 5527 - DNA, 20 bp, Influenza A
caattcaatccgactttctg

SEQ ID NO: 5528 - DNA, 22 bp, Influenza A
caaattagtggaatacaggaat

SEQ ID NO: 5529 - DNA, 20 bp, Influenza A
acaccagtaaatgttaccaa

SEQ ID NO: 5530 - DNA, 20 bp, Influenza A
ggactacactagacaacagg

SEQ ID NO: 5531 - DNA, 21 bp, Influenza A
ctcctcgaataatcaagtagt

SEQ ID NO: 5532 - DNA, 15 bp, Influenza A
ccgctggtggagaca

SEQ ID NO: 5533 - DNA, 22 bp, Influenza A
accatagaaaaggaaatttgtc

SEQ ID NO: 5534 - DNA, 20 bp, Influenza A
aagcaatatgagtggaactc

SEQ ID NO: 5535 - DNA, 21 bp, Influenza A
gcaacagtatgtttcctaatg

SEQ ID NO: 5536 - DNA, 23 bp, Influenza A
atataagatacaggaattggtca

SEQ ID NO: 5537 - DNA, 19 bp, Influenza A
tctctcaacattgcaacaa

SEQ ID NO: 5538 - DNA, 18 bp, Influenza A
tttcctcatgcaggttgc

SEQ ID NO: 5539 - DNA, 18 bp, Influenza A
gtgcggtcttggtaaatg

SEQ ID NO: 5540 - DNA, 19 bp, Influenza A
gaaccttatgtatcgtgcg

SEQ ID NO: 5541 - DNA, 19 bp, Influenza A
agggactacactagacaac

SEQ ID NO: 5542 - DNA, 22 bp, Influenza A
agaacatagtgcatttgaatag

SEQ ID NO: 5543 - DNA, 22 bp, Influenza A
tctaactattgcgacaatatgt

SEQ ID NO: 5544 - DNA, 22 bp, Influenza A
agaaatagtgcatttgaatagc

SEQ ID NO: 5545 - DNA, 17 bp, Influenza A
atgccgtgtgaaccaac

SEQ ID NO: 5546 - DNA, 20 bp, Influenza A
gaaccagacaagtgtgtata

SEQ ID NO: 5547 - DNA, 21 bp, Influenza A
tagaattcctcatagaaccct

SEQ ID NO: 5548 - DNA, 20 bp, Influenza A
cccctcgaataatcaagtag

SEQ ID NO: 5549 - DNA, 18 bp, Influenza A
aacgactgtaacactgca

SEQ ID NO: 5550 - DNA, 19 bp, Influenza A
tttcaagcagtatgagtgc

SEQ ID NO: 5551 - DNA, 22 bp, Influenza A
ctaactattgcgacaatatgtt

SEQ ID NO: 5552 - DNA, 19 bp, Influenza A
ctagcaacgactgtaacac

SEQ ID NO: 5553 - DNA, 21 bp, Influenza A
cacctcgaataatcaagtagt

SEQ ID NO: 5554 - DNA, 18 bp, Influenza A
tgttccgtttcacttggg

SEQ ID NO: 5555 - DNA, 15 bp, Influenza A
cactcgggcagggaa

SEQ ID NO: 5556 - DNA, 22 bp, Influenza A
gatagtgcatttgaatagtacc

SEQ ID NO: 5557 - DNA, 20 bp, Influenza A
ggaccacaatagacaacatt

SEQ ID NO: 5558 - DNA, 16 bp, Influenza A
tgggaaccaggcaagt

SEQ ID NO: 5559 - DNA, 22 bp, Influenza A
acattacattttaagcaacatg

SEQ ID NO: 5560 - DNA, 23 bp, Influenza A
actaataccaccatagaaaaaga

SEQ ID NO: 5561 - DNA, 19 bp, Influenza A
aagcaatatgagtggagct

SEQ ID NO: 5562 - DNA, 17 bp, Influenza A
tgggtgttccgtttcac

SEQ ID NO: 5563 - DNA, 22 bp, Influenza A
ataatactaccatagagaggga

SEQ ID NO: 5564 - DNA, 23 bp, Influenza A
gatagtacatttgaataacacca

SEQ ID NO: 5565 - DNA, 19 bp, Influenza A
gaacccttttaatgagcga

SEQ ID NO: 5566 - DNA, 17 bp, Influenza A
aacatgagtgcgactcc

SEQ ID NO: 5567 - DNA, 20 bp, Influenza A
gcaattggctctatttctct

SEQ ID NO: 5568 - DNA, 22 bp, Influenza A
actacacatgatagaattcctc

SEQ ID NO: 5569 - DNA, 22 bp, Influenza A
aactcctcgaataatcaagtag

SEQ ID NO: 5570 - DNA, 21 bp, Influenza A
agtaaactacaggaattggtc

SEQ ID NO: 5571 - DNA, 18 bp, Influenza A
tcccgtttcatttgggaa

SEQ ID NO: 5572 - DNA, 20 bp, Influenza A
tgcattttaagcaacatgag

SEQ ID NO: 5573 - DNA, 20 bp, Influenza A
tcttagcaacgactatgaca

SEQ ID NO: 5574 - DNA, 22 bp, Influenza A
ttgactaataccaccatagaaa

SEQ ID NO: 5575 - DNA, 20 bp, Influenza A
tttctcaaaggacaactcaa

SEQ ID NO: 5576 - DNA, 20 bp, Influenza A
acaactcaattaggctctcc

SEQ ID NO: 5577 - DNA, 20 bp, Influenza A
cctcgaacaatcaagtagtt

SEQ ID NO: 5578 - DNA, 19 bp, Influenza A
tcaaacggcacaatacatg

SEQ ID NO: 5579 - DNA, 23 bp, Influenza A
aatataagatacaggaattggtc

SEQ ID NO: 5580 - DNA, 18 bp, Influenza A
gttccgtttcacttggga

SEQ ID NO: 5581 - DNA, 18 bp, Influenza A
tggtccagttcaagttgc

SEQ ID NO: 5582 - DNA, 20 bp, Influenza A
atcttagcaacgactatgac

SEQ ID NO: 5583 - DNA, 18 bp, Influenza A
gtcaaatcacagggttcg

SEQ ID NO: 5584 - DNA, 19 bp, Influenza A
gttccgtctctctaaccat

SEQ ID NO: 5585 - DNA, 19 bp, Influenza A
ccctcgaacaatcaagtag

SEQ ID NO: 5586 - DNA, 18 bp, Influenza A
tcaaatcacagggttcgc

SEQ ID NO: 5587 - DNA, 15 bp, Influenza A
tgagtgcgactcccc

SEQ ID NO: 5588 - DNA, 19 bp, Influenza A
ttcaagcagtatgagtgcg

SEQ ID NO: 5589 - DNA, 18 bp, Influenza A
tgtcccgtttcatttggg

SEQ ID NO: 5590 - DNA, 17 bp, Influenza A
acatgagtgcgactcca

SEQ ID NO: 5591 - DNA, 20 bp, Influenza A
gtgacattgcattttaagca

SEQ ID NO: 5592 - DNA, 20 bp, Influenza A
ctacatttcaagcagaacga

SEQ ID NO: 5593 - DNA, 20 bp, Influenza A
attttaagcaacatgagtgc

SEQ ID NO: 5594 - DNA, 20 bp, Influenza A
catcttagcaacgactatga

SEQ ID NO: 5595 - DNA, 20 bp, Influenza A
cggtagaatacaggaattgg

SEQ ID NO: 5596 - DNA, 19 bp, Influenza A
ctgtgacactgcatttcaa

SEQ ID NO: 5597 - DNA, 17 bp, Influenza A
ggaatgccgtgtgaacc

SEQ ID NO: 5598 - DNA, 21 bp, Influenza A
ctcaccatttccacaatatgc

SEQ ID NO: 5599 - DNA, 19 bp, Influenza A
gcagattgccatcttagtt

SEQ ID NO: 5600 - DNA, 18 bp, Influenza A
gttcgctcctttttccaa

SEQ ID NO: 5601 - DNA, 22 bp, Influenza A
gacaattcaatcagactttctg

SEQ ID NO: 5602 - DNA, 19 bp, Influenza A
acattactggatttgcacc

SEQ ID NO: 5603 - DNA, 23 bp, Influenza A
ctatttctctaactattgcgata

SEQ ID NO: 5604 - DNA, 21 bp, Influenza A
atagaactcctcatagaaccc

SEQ ID NO: 5605 - DNA, 16 bp, Influenza A
acttgggcagggaacc

SEQ ID NO: 5606 - DNA, 16 bp, Influenza A
cttgggcagggaacca

SEQ ID NO: 5607 - DNA, 20 bp, Influenza A
ctaaccattgccacagtatg

SEQ ID NO: 5608 - DNA, 23 bp, Influenza A
gataaacaacataacaacaacaa

SEQ ID NO: 5609 - DNA, 24 bp, Influenza A
gtaataaacaacataacaacaaca

SEQ ID NO: 5610 - DNA, 20 bp, Influenza A
atcaacaatagcccttctca

SEQ ID NO: 5611 - DNA, 21 bp, Influenza A
tcatacatgagaaaatagggg

SEQ ID NO: 5612 - DNA, 22 bp, Influenza A
cagtcatacatgagaaaatagg

SEQ ID NO: 5613 - DNA, 20 bp, Influenza A
caacaatagcccttctcatt

SEQ ID NO: 5614 - DNA, 20 bp, Influenza A
aacaatagcccttctcattg

SEQ ID NO: 5615 - DNA, 21 bp, Influenza A
tactctatcaacaatagccct

SEQ ID NO: 5616 - DNA, 24 bp, Influenza A
cactgttatacatgagaaaatagg

SEQ ID NO: 5617 - DNA, 19 bp, Influenza A
gtcaacaatagcccttctc

SEQ ID NO: 5618 - DNA, 21 bp, Influenza A
ctactctatcaacaatagccc

SEQ ID NO: 5619 - DNA, 22 bp, Influenza A
ggtaaacaacataacaacaaca

SEQ ID NO: 5620 - DNA, 23 bp, Influenza A
catacatgagaaaataggaaacc

SEQ ID NO: 5621 - DNA, 21 bp, Influenza A
tacatgagaaaataggggacc

SEQ ID NO: 5622 - DNA, 19 bp, Influenza A
atagcccttctcattggag

SEQ ID NO: 5623 - DNA, 20 bp, Influenza A
aacaatagcccttctcatcg

SEQ ID NO: 5624 - DNA, 20 bp, Influenza A
cactctatcaacaatagccc

SEQ ID NO: 5625 - DNA, 20 bp, Influenza A
gactctatcaacaatagccc

SEQ ID NO: 5626 - DNA, 18 bp, Influenza A
agcccttctcattggagt

SEQ ID NO: 5627 - DNA, 22 bp, Influenza A
aacaacaataataactgaagcg

SEQ ID NO: 5628 - DNA, 21 bp, Influenza A
tagggactaaacatagcaatg

SEQ ID NO: 5629 - DNA, 23 bp, Influenza A
cactgtaataaacaacataacaa

SEQ ID NO: 5630 - DNA, 21 bp, Influenza A
ctaaacatagcaatggaacca

SEQ ID NO: 5631 - DNA, 22 bp, Influenza A
aattacaaggagatatgcattg

SEQ ID NO: 5632 - DNA, 22 bp, Influenza A
aacaacaataataactgaagca

SEQ ID NO: 5633 - DNA, 20 bp, Influenza A
aaagacgtcatagtcacaag

SEQ ID NO: 5634 - DNA, 20 bp, Influenza A
caaacatagcaatggaacca

SEQ ID NO: 5635 - DNA, 20 bp, Influenza A
gagaaaataggagaccacca

SEQ ID NO: 5636 - DNA, 19 bp, Influenza A
gtcatagtcacaagggaac

SEQ ID NO: 5637 - DNA, 23 bp, Influenza A
aacactactctatcaacaatagc

SEQ ID NO: 5638 - DNA, 18 bp, Influenza A
tgattgctggtcctttgc

SEQ ID NO: 5639 - DNA, 19 bp, Influenza A
ctgggtgagaacaaagacg

SEQ ID NO: 5640 - DNA, 22 bp, Influenza A
aacaataataactgaagcagaa

SEQ ID NO: 5641 - DNA, 20 bp, Influenza A
aggacaatgcaatacgattg

SEQ ID NO: 5642 - DNA, 21 bp, Influenza A
acacagtcatacatgagaaaa

SEQ ID NO: 5643 - DNA, 20 bp, Influenza A
gacaatgcaatacgattggg

SEQ ID NO: 5644 - DNA, 21 bp, Influenza A
ataagcaacataacaacaaca

SEQ ID NO: 5645 - DNA, 21 bp, Influenza A
tacatgagaaaatagaggacc

SEQ ID NO: 5646 - DNA, 21 bp, Influenza A
aacactgtcatacatgagaaa

SEQ ID NO: 5647 - DNA, 20 bp, Influenza A
aaggacaatgcaatacgatt

SEQ ID NO: 5648 - DNA, 18 bp, Influenza A
aattgctggtcctttgct

SEQ ID NO: 5649 - DNA, 22 bp, Influenza A
gtagtgaataccactctatcaa

SEQ ID NO: 5650 - DNA, 17 bp, Influenza A
ctgctggtcctttgctc

SEQ ID NO: 5651 - DNA, 17 bp, Influenza A
attgctggtcctttgct

SEQ ID NO: 5652 - DNA, 20 bp, Influenza A
tcaacacagtcatacatgag

SEQ ID NO: 5653 - DNA, 20 bp, Influenza A
caacacagtcatacatgaga

SEQ ID NO: 5654 - DNA, 19 bp, Influenza A
ttttcacaaggacaatgca

SEQ ID NO: 5655 - DNA, 22 bp, Influenza A
ataataattgctggtcctttgc

SEQ ID NO: 5656 - DNA, 21 bp, Influenza A
tgagaaaataggagaccatca

SEQ ID NO: 5657 - DNA, 25 bp, Influenza A
ctataataacatacaataacactgt

SEQ ID NO: 5658 - DNA, 18 bp, Influenza A
gcccttctcattggagtg

SEQ ID NO: 5659 - DNA, 18 bp, Influenza A
caactgctggtcctttgc

SEQ ID NO: 5660 - DNA, 17 bp, Influenza A
cactgctggtcctttgc

SEQ ID NO: 5661 - DNA, 21 bp, Influenza A
caaagacgtaatagtcacaag

SEQ ID NO: 5662 - DNA, 19 bp, Influenza A
aggacaatgcaatacgact

SEQ ID NO: 5663 - DNA, 23 bp, Influenza A
catacatgaaaaaataggaaacc

SEQ ID NO: 5664 - DNA, 22 bp, Influenza A
aataataactgaagcagaaagg

SEQ ID NO: 5665 - DNA, 24 bp, Influenza A
acactataataacatacaacaaca

SEQ ID NO: 5666 - DNA, 22 bp, Influenza A
aacaataataactaaagcggaa

SEQ ID NO: 5667 - DNA, 27 bp, Influenza A
actataataacatacaataatactgtg

SEQ ID NO: 5668 - DNA, 20 bp, Influenza A
agacgtaatagtcacaaggg

SEQ ID NO: 5669 - DNA, 21 bp, Influenza A
agaacaaagacgttatagtca

SEQ ID NO: 5670 - DNA, 18 bp, Influenza A
atacgactgggtgagaac

SEQ ID NO: 5671 - DNA, 19 bp, Influenza A
gactaaacacagcaatgga

SEQ ID NO: 5672 - DNA, 19 bp, Influenza A
tgagaaaataggggaccac

SEQ ID NO: 5673 - DNA, 19 bp, Influenza A
ggactaaacacagcaatgg

SEQ ID NO: 5674 - DNA, 19 bp, Influenza A
tctcattggagtgggaaac

SEQ ID NO: 5675 - DNA, 22 bp, Influenza A
tagttttcaacacagtcataca

SEQ ID NO: 5676 - DNA, 22 bp, Influenza A
gtagtgaatacgactctatcaa

SEQ ID NO: 5677 - DNA, 22 bp, Influenza A
ataacactgtgataaacaacat

SEQ ID NO: 5678 - DNA, 19 bp, Influenza A
atacgattgggtgagaaca

SEQ ID NO: 5679 - DNA, 17 bp, Influenza A
ggacaatgcaatacggc

SEQ ID NO: 5680 - DNA, 20 bp, Influenza A
actaaacatagcaatgggac

SEQ ID NO: 5681 - DNA, 20 bp, Influenza A
ctaaacatagcaatgggacc

SEQ ID NO: 5682 - DNA, 21 bp, Influenza A
agttttcaacacagtcataca

SEQ ID NO: 5683 - DNA, 18 bp, Influenza A
ggtgagaacaaagacgtc

SEQ ID NO: 5684 - DNA, 18 bp, Influenza A
gacaatgcaatacggctg

SEQ ID NO: 5685 - DNA, 22 bp, Influenza A
acaataacactgtgataaacaa

SEQ ID NO: 5686 - DNA, 20 bp, Influenza A
ggtgagaacaaagacgtaat

SEQ ID NO: 5687 - DNA, 20 bp, Influenza A
ggatgtcatagtcacaaggg

SEQ ID NO: 5688 - DNA, 20 bp, Influenza A
tcccttttcacaaagacaac

SEQ ID NO: 5689 - DNA, 20 bp, Influenza A
gcagtgacaccataataaca

SEQ ID NO: 5690 - DNA, 21 bp, Influenza A
tgcagtgacactataataaca

SEQ ID NO: 5691 - DNA, 21 bp, Influenza A
gattttcaacacagtcataca

SEQ ID NO: 5692 - DNA, 20 bp, Influenza A
taatccgattcccaatagga

SEQ ID NO: 5693 - DNA, 25 bp, Influenza A
tacaataatactgtgataaacaaca

SEQ ID NO: 5694 - DNA, 23 bp, Influenza A
cataataacatacaacaacacag

SEQ ID NO: 5695 - DNA, 25 bp, Influenza A
acatacaataatactgtgataaaca

SEQ ID NO: 5696 - DNA, 21 bp, Influenza A
tattagggaccaaacatagca

SEQ ID NO: 5697 - DNA, 21 bp, Influenza A
attaaagacaggacaccatat

SEQ ID NO: 5698 - DNA, 22 bp, Influenza A
tttagttttcaacacagtcata

SEQ ID NO: 5699 - DNA, 21 bp, Influenza A
acaacactgtgataaacaaca

SEQ ID NO: 5700 - DNA, 20 bp, Influenza A
attagggaccaaacatagca

SEQ ID NO: 5701 - DNA, 20 bp, Influenza A
agacaggacaccatatagat

SEQ ID NO: 5702 - DNA, 20 bp, Influenza A
tttcaacacagtcatacacg

SEQ ID NO: 5703 - DNA, 18 bp, Influenza A
gctgggtgagaacaaaga

SEQ ID NO: 5704 - DNA, 21 bp, Influenza A
ataataactgaagcggaaagg

SEQ ID NO: 5705 - DNA, 26 bp, Influenza A
ataataacatataataacactgtgat

SEQ ID NO: 5706 - DNA, 18 bp, Influenza A
cgcaatacgattgggtga

SEQ ID NO: 5707 - DNA, 18 bp, Influenza A
gggtgaaaacaaagacgt

SEQ ID NO: 5708 - DNA, 18 bp, Influenza A
cttctcattggagtgggg

SEQ ID NO: 5709 - DNA, 22 bp, Influenza A
attacaaggagatatgtgttgc

SEQ ID NO: 5710 - DNA, 20 bp, Influenza A
gaggattcttcccttttcac

SEQ ID NO: 5711 - DNA, 19 bp, Influenza A
aaataggggaccaccaaac

SEQ ID NO: 5712 - DNA, 20 bp, Influenza A
taataactgaagcggaaagg

SEQ ID NO: 5713 - DNA, 21 bp, Influenza A
taataacaatcggggtagtga

SEQ ID NO: 5714 - DNA, 20 bp, Influenza A
caatacgattgggtgaaaac

SEQ ID NO: 5715 - DNA, 18 bp, Influenza A
aacgcaatacgattgggt

SEQ ID NO: 5716 - DNA, 19 bp, Influenza A
tggttttcaacacagtcat

SEQ ID NO: 5717 - DNA, 19 bp, Influenza A
aataggagaccaccaaaca

SEQ ID NO: 5718 - DNA, 19 bp, Influenza A
ttcagaggattcttccctt

SEQ ID NO: 5719 - DNA, 19 bp, Influenza A
ccttcagaggattcttccc

SEQ ID NO: 5720 - DNA, 21 bp, Influenza A
ttatgttagctgcgataatga

SEQ ID NO: 5721 - DNA, 19 bp, Influenza A
ccccttcagaggattcttc

SEQ ID NO: 5722 - DNA, 17 bp, Influenza A
tgcattgcttggtcgag

SEQ ID NO: 5723 - DNA, 21 bp, Influenza A
aatttggttttcaacacagtc

SEQ ID NO: 5724 - DNA, 21 bp, Influenza A
ctatgttagctgcgataatga

SEQ ID NO: 5725 - DNA, 21 bp, Influenza A
ataccactctgtcaacaatag

SEQ ID NO: 5726 - DNA, 20 bp, Influenza A
acactgtggtaaacaacata

SEQ ID NO: 5727 - DNA, 20 bp, Influenza A
ccttttcacaaagacaatgc

SEQ ID NO: 5728 - DNA, 18 bp, Influenza A
cgattgggtgagaacaag

SEQ ID NO: 5729 - DNA, 20 bp, Influenza A
cagaacaccatataggtctc

SEQ ID NO: 5730 - DNA, 22 bp, Influenza A
tatgttagctgtgataatgaca

SEQ ID NO: 5731 - DNA, 19 bp, Influenza A
caatacgactgggtgaaaa

SEQ ID NO: 5732 - DNA, 18 bp, Influenza A
agcccttttcattggagt

SEQ ID NO: 5733 - DNA, 22 bp, Influenza A
atataggtctctaatccgattc

SEQ ID NO: 5734 - DNA, 20 bp, Influenza A
ggacaccatataggtctcta

SEQ ID NO: 5735 - DNA, 21 bp, Influenza A
taataactaaagcggaaaagc

SEQ ID NO: 5736 - DNA, 20 bp, Influenza A
ggactagacatagcaatggg

SEQ ID NO: 5737 - DNA, 17 bp, Influenza A
tgcaatacgattgggcg

SEQ ID NO: 5738 - DNA, 18 bp, Influenza A
gtcctttgctcttgctca

SEQ ID NO: 5739 - DNA, 20 bp, Influenza A
ctttcaagtctccactaccg

SEQ ID NO: 5740 - DNA, 19 bp, Influenza A
ctttcaagcctccactacc

SEQ ID NO: 5741 - DNA, 18 bp, Influenza A
cctttgctcttgctcaag

SEQ ID NO: 5742 - DNA, 18 bp, Influenza A
ggagaccaccaaactgtg

SEQ ID NO: 5743 - DNA, 21 bp, Influenza A
acagaacatcatataggtctc

SEQ ID NO: 5744 - DNA, 23 bp, Influenza A
ccataattacatacaacaacact

SEQ ID NO: 5745 - DNA, 21 bp, Influenza A
aggaaacttagttttcaacac

SEQ ID NO: 5746 - DNA, 18 bp, Influenza A
tttcaagcctccactacc

SEQ ID NO: 5747 - DNA, 21 bp, Influenza A
caaactgtggtatatccaaca

SEQ ID NO: 5748 - DNA, 20 bp, Influenza A
gtgacaatgatgattgctgg

SEQ ID NO: 5749 - DNA, 17 bp, Influenza A
tcctttgctcttgccca

SEQ ID NO: 5750 - DNA, 24 bp, Influenza A
aataacaataggtgaagtgaatac

SEQ ID NO: 5751 - DNA, 20 bp, Influenza A
gtcatagttacaagggagcc

SEQ ID NO: 5752 - DNA, 20 bp, Influenza A
ttcttattggagttgggaac

SEQ ID NO: 5753 - DNA, 19 bp, Influenza A
acatgggaaaataggggac

SEQ ID NO: 5754 - DNA, 19 bp, Influenza A
gacaatgatgattgctggt

SEQ ID NO: 5755 - DNA, 18 bp, Influenza A
ccttccgaggtttcttcc

SEQ ID NO: 5756 - DNA, 18 bp, Influenza A
cccttccgaggtttcttc

SEQ ID NO: 5757 - DNA, 16 bp, Influenza A
tccactaccgctgtgc

SEQ ID NO: 5758 - DNA, 20 bp, Influenza A
atatgtgttgcttggtcaag

SEQ ID NO: 5759 - DNA, 18 bp, Influenza A
cttggtcaagtagcagct

SEQ ID NO: 5760 - DNA, 21 bp, Influenza A
gagaacaaggatgtcatagtc

SEQ ID NO: 5761 - DNA, 18 bp, Influenza A
aaaagagtggatgcacgt

SEQ ID NO: 5762 - DNA, 25 bp, Influenza A
taacatataacaaaacggtaataaa

SEQ ID NO: 5763 - DNA, 20 bp, Influenza A
ttcacccaacaataatgacc

SEQ ID NO: 5764 - DNA, 18 bp, Influenza A
ttccgaggtttcttcccc

SEQ ID NO: 5765 - DNA, 19 bp, Influenza A
ttccctttccacaaagaca

SEQ ID NO: 5766 - DNA, 18 bp, Influenza A
gggagccttatgtcagtt

SEQ ID NO: 5767 - DNA, 19 bp, Influenza A
taactgaagcagaaaggcc

SEQ ID NO: 5768 - DNA, 19 bp, Influenza A
ctctactggggactaaaca

SEQ ID NO: 5769 - DNA, 16 bp, Influenza A
ggtcctttgctctcgc

SEQ ID NO: 5770 - DNA, 20 bp, Influenza A
gaacaaggatgtcatagtca

SEQ ID NO: 5771 - DNA, 22 bp, Influenza A
tgtatatccaacaataacagcc

SEQ ID NO: 5772 - DNA, 18 bp, Influenza A
attccgaggtttcttccc

SEQ ID NO: 5773 - DNA, 18 bp, Influenza A
tgattgctggtcttttgc

SEQ ID NO: 5774 - DNA, 17 bp, Influenza A
tgacgggaaagagtgga

SEQ ID NO: 5775 - DNA, 18 bp, Influenza A
cacccaacaataacgacc

SEQ ID NO: 5776 - DNA, 18 bp, Influenza A
gcacagcaatggaacaaa

SEQ ID NO: 5777 - DNA, 19 bp, Influenza A
aaataggaaaccaccaacc

SEQ ID NO: 5778 - DNA, 18 bp, Influenza A
gagccttatgtcagttgc

SEQ ID NO: 5779 - DNA, 19 bp, Influenza A
ataccactctgtcaacact

SEQ ID NO: 5780 - DNA, 19 bp, Influenza A
cattgctagggactagaca

SEQ ID NO: 5781 - DNA, 17 bp, Influenza A
aggggaccaccaaactg

SEQ ID NO: 5782 - DNA, 18 bp, Influenza A
aacaataacgacccctgc

SEQ ID NO: 5783 - DNA, 20 bp, Influenza A
tgtcgtgaacactactctat

SEQ ID NO: 5784 - DNA, 21 bp, Influenza A
taattcgtttcccaataggaa

SEQ ID NO: 5785 - DNA, 16 bp, Influenza A
tgctctcgcacaagga

SEQ ID NO: 5786 - DNA, 16 bp, Influenza A
ggtcgagcagcagttg

SEQ ID NO: 5787 - DNA, 16 bp, Influenza A
cactaccgctgtgccc

SEQ ID NO: 5788 - DNA, 16 bp, Influenza A
ttggtcgagcagcagt

SEQ ID NO: 5789 - DNA, 19 bp, Influenza A
agttgggaacctgattttc

SEQ ID NO: 5790 - DNA, 20 bp, Influenza A
caccatatagatcgctgatc

SEQ ID NO: 5791 - DNA, 21 bp, Influenza A
actgtgataaacaacacaaca

SEQ ID NO: 5792 - DNA, 16 bp, Influenza A
tcctttgctctcgcgc

SEQ ID NO: 5793 - DNA, 21 bp, Influenza A
acaatactgtggtaaacaaca

SEQ ID NO: 5794 - DNA, 20 bp, Influenza A
tgattcacccaacaataacg

SEQ ID NO: 5795 - DNA, 16 bp, Influenza A
aggggaccaccaaaca

SEQ ID NO: 5796 - DNA, 19 bp, Influenza A
actcacccaacaataacga

SEQ ID NO: 5797 - DNA, 17 bp, Influenza A
gcagagaggcctttcaa

SEQ ID NO: 5798 - DNA, 19 bp, Influenza A
gagccttatgtcagatgcg

SEQ ID NO: 5799 - DNA, 20 bp, Influenza A
tataggtcgttaatccggtt

SEQ ID NO: 5800 - DNA, 19 bp, Influenza A
gactcacccaacaataacg

SEQ ID NO: 5801 - DNA, 19 bp, Influenza A
gtaactaaagcggaaacgc

SEQ ID NO: 5802 - DNA, 18 bp, Influenza A
acccacccaacaataacg

SEQ ID NO: 5803 - DNA, 21 bp, Influenza A
aataataaccgaagcagaaag

SEQ ID NO: 5804 - DNA, 16 bp, Influenza A
ctcactgccactgtgc

SEQ ID NO: 5805 - DNA, 19 bp, Influenza A
ttagctgcgataacgatca

SEQ ID NO: 5806 - DNA, 19 bp, Influenza A
gataacgatcactgctggt

SEQ ID NO: 5807 - DNA, 19 bp, Influenza A
attagctgcgataacgatc

SEQ ID NO: 5808 - DNA, 20 bp, Influenza A
tgcagtgacaccataattac

SEQ ID NO: 5809 - DNA, 15 bp, Influenza A
gccactgtgcccctt

SEQ ID NO: 5810 - DNA, 15 bp, Influenza A
cgctgtgccccttca

SEQ ID NO: 5811 - DNA, 20 bp, Influenza A
ccatatagatcgctaatccg

SEQ ID NO: 5812 - DNA, 15 bp, Influenza A
tgccccttccgaggt

SEQ ID NO: 5813 - DNA, 19 bp, Influenza A
ggtctctaattcgtttccc

SEQ ID NO: 5814 - DNA, 18 bp, Influenza A
gagaccaccaaacagtga

SEQ ID NO: 5815 - DNA, 20 bp, Influenza A
gccatatagatcgctaatcc

SEQ ID NO: 5816 - DNA, 20 bp, Influenza A
ggaatttggttttcaacaca

SEQ ID NO: 5817 - DNA, 18 bp, Influenza A
tgtcaacactagcccttc

SEQ ID NO: 5818 - DNA, 18 bp, Influenza A
ccctacattagctgcgat

SEQ ID NO: 5819 - DNA, 18 bp, Influenza A
agctgcgataacgatcac

SEQ ID NO: 5820 - DNA, 18 bp, Influenza A
aaggagcgctattaggga

SEQ ID NO: 5821 - DNA, 23 bp, Influenza A
ggagacaataacactgtaataaa

SEQ ID NO: 5822 - DNA, 21 bp, Influenza A
tcattggagtaggaaacttag

SEQ ID NO: 5823 - DNA, 17 bp, Influenza A
ttcaagtcctcactgcc

SEQ ID NO: 5824 - DNA, 17 bp, Influenza A
tcttgctcaaggagcgc

SEQ ID NO: 5825 - DNA, 17 bp, Influenza A
gtcctcactgccactgt

SEQ ID NO: 5826 - DNA, 18 bp, Influenza A
gcacttcaagtcctcact

SEQ ID NO: 5827 - DNA, 17 bp, Influenza A
ctgaagcagaaaggcct

SEQ ID NO: 5828 - DNA, 20 bp, Influenza A
caacgctgttatacatgaga

SEQ ID NO: 5829 - DNA, 17 bp, Influenza A
atacccaaccgcaacag

SEQ ID NO: 5830 - DNA, 17 bp, Influenza A
acgactgggtgagaaca

SEQ ID NO: 5831 - DNA, 17 bp, Influenza A
aacgatcactgctggtc

SEQ ID NO: 5832 - DNA, 19 bp, Influenza A
agacaggacgccatataga

SEQ ID NO: 5833 - DNA, 17 bp, Influenza A
ataacgacccctgcagt

SEQ ID NO: 5834 - DNA, 19 bp, Influenza A
attggagtgggaaatctgg

SEQ ID NO: 5835 - DNA, 16 bp, Influenza A
ttgctcaaggagcgct

SEQ ID NO: 5836 - DNA, 16 bp, Influenza A
cttgctcaaggagcgc

SEQ ID NO: 5837 - DNA, 16 bp, Influenza A
accactctgccccttt

SEQ ID NO: 5838 - DNA, 20 bp, Influenza A
aaccatcaaagataggacac

SEQ ID NO: 5839 - DNA, 16 bp, Influenza A
taacgacccctgcagt

SEQ ID NO: 5840 - DNA, 19 bp, Influenza A
ataacgactcctgcagtac

SEQ ID NO: 5841 - DNA, 17 bp, Influenza A
ccaccaaacagtgaccc

SEQ ID NO: 5842 - DNA, 18 bp, Influenza A
ttcaagtccccactaccg

SEQ ID NO: 5843 - DNA, 15 bp, Influenza A
ccgcaacagcacccg

SEQ ID NO: 5844 - DNA, 18 bp, Influenza A
aacagtgacccatccaac

SEQ ID NO: 5845 - DNA, 17 bp, Influenza A
caaggggctctactggg

SEQ ID NO: 5846 - DNA, 17 bp, Influenza A
acaataacgacccctgc

SEQ ID NO: 5847 - DNA, 15 bp, Influenza A
acagccccggtggta

SEQ ID NO: 5848 - DNA, 18 bp, Influenza A
gattgggcgagaacaaag

SEQ ID NO: 5849 - DNA, 15 bp, Influenza A
cagccccggtggtaa

SEQ ID NO: 5850 - DNA, 20 bp, Influenza A
catccaacaataatgacccc

SEQ ID NO: 5851 - DNA, 20 bp, Influenza A
ccatccaacaataatgaccc

SEQ ID NO: 5852 - DNA, 22 bp, Influenza A
caccatatagatccctaatcaa

SEQ ID NO: 5853 - DNA, 18 bp, Influenza A
atacggctaggtgagaac

SEQ ID NO: 5854 - DNA, 17 bp, Influenza A
ggcctttcaagtctcca

SEQ ID NO: 5855 - DNA, 17 bp, Influenza A
caacagtaacagccccg

SEQ ID NO: 5856 - DNA, 17 bp, Influenza A
aagtctccactaccgct

SEQ ID NO: 5857 - DNA, 18 bp, Influenza A
ggtggtaactaaagcgga

SEQ ID NO: 5858 - DNA, 18 bp, Influenza A
gaaccgcacttcaagtcc

SEQ ID NO: 5859 - DNA, 21 bp, Influenza A
taggtctctaatccaattccc

SEQ ID NO: 5860 - DNA, 17 bp, Influenza A
aaccgcacttcaagtcc

SEQ ID NO: 5861 - DNA, 20 bp, Influenza A
ctaaagcggaaaagcatttc

SEQ ID NO: 5862 - DNA, 20 bp, Influenza A
agaccatcaaatagtgaccc

SEQ ID NO: 5863 - DNA, 17 bp, Influenza A
caccaaacagtgaccca

SEQ ID NO: 5864 - DNA, 18 bp, Influenza A
aggaaaccaccaaacagt

SEQ ID NO: 5865 - DNA, 19 bp, Influenza A
taatgacccctgaagtacc

SEQ ID NO: 5866 - DNA, 18 bp, Influenza A
agcggaaaagcatttcaa

SEQ ID NO: 5867 - DNA, 17 bp, Influenza A
gacaactgctggtcctt

SEQ ID NO: 5868 - DNA, 17 bp, Influenza A
caagcctccactaccgc

SEQ ID NO: 5869 - DNA, 17 bp, Influenza A
atacggctgggtgagaa

SEQ ID NO: 5870 - DNA, 16 bp, Influenza A
tcttttgccctcgccc

SEQ ID NO: 5871 - DNA, 16 bp, Influenza A
gcaatacggctgggtg

SEQ ID NO: 5872 - DNA, 16 bp, Influenza A
aagcctccactaccgc

SEQ ID NO: 5873 - DNA, 20 bp, Influenza A
aaagcatttcaagtcctcac

SEQ ID NO: 5874 - DNA, 15 bp, Influenza A
ccctcgcccaagggg

SEQ ID NO: 5875 - DNA, 20 bp, Influenza A
gcatttcaagtcctcattgc

SEQ ID NO: 5876 - DNA, 18 bp, Influenza A
taactgaagcggaaaggg

SEQ ID NO: 5877 - DNA, 17 bp, Influenza A
cttctcatcggagtggg

SEQ ID NO: 5878 - DNA, 17 bp, Influenza A
agcccttctcatcggag

SEQ ID NO: 5879 - DNA, 18 bp, Influenza A
aaacgcatgaacaaccct

SEQ ID NO: 5880 - DNA, 17 bp, Influenza A
aacaaccctgtccacga

SEQ ID NO: 5881 - DNA, 22 bp, Influenza A
aacacaacaaattactacaact

SEQ ID NO: 5882 - DNA, 19 bp, Influenza A
aagcttatgctcaatatgg

SEQ ID NO: 5883 - DNA, 22 bp, Influenza A
aatcataacaataggtagtgcc

SEQ ID NO: 5884 - DNA, 19 bp, Influenza A
aatcataaccatcggcagt

SEQ ID NO: 5885 - DNA, 20 bp, Influenza A
aatcataaccatcggtagtg

SEQ ID NO: 5886 - DNA, 21 bp, Influenza A
acaactataccacacgtattg

SEQ ID NO: 5887 - DNA, 19 bp, Influenza A
accacaataatcgaccctc

SEQ ID NO: 5888 - DNA, 23 bp, Influenza A
agaacaactataccacaataatc

SEQ ID NO: 5889 - DNA, 21 bp, Influenza A
agggttgctccttaaaataac

SEQ ID NO: 5890 - DNA, 24 bp, Influenza A
ataacaagtttatgctcaatatgg

SEQ ID NO: 5891 - DNA, 17 bp, Influenza A
ataggcctgctcctcaa

SEQ ID NO: 5892 - DNA, 17 bp, Influenza A
atagggttgctcctccc

SEQ ID NO: 5893 - DNA, 16 bp, Influenza A
atcgaccctcagcccc

SEQ ID NO: 5894 - DNA, 19 bp, Influenza A
atcggtagtgcgagtattg

SEQ ID NO: 5895 - DNA, 20 bp, Influenza A
atgctcaatatggtttagcc

SEQ ID NO: 5896 - DNA, 24 bp, Influenza A
caacacaacgaattactataaatg

SEQ ID NO: 5897 - DNA, 16 bp, Influenza A
caagggacccaaccgc

SEQ ID NO: 5898 - DNA, 18 bp, Influenza A
cacacgtattgaccctca

SEQ ID NO: 5899 - DNA, 18 bp, Influenza A
catcggcagtgctagtat

SEQ ID NO: 5900 - DNA, 19 bp, Influenza A
cattacaaccaagggaccc

SEQ ID NO: 5901 - DNA, 20 bp, Influenza A
cattacaaccaagtgacaca

SEQ ID NO: 5902 - DNA, 17 bp, Influenza A
ccaaccgcatgaacaag

SEQ ID NO: 5903 - DNA, 18 bp, Influenza A
ccaatgtgcagaacaact

SEQ ID NO: 5904 - DNA, 23 bp, Influenza A
cttaaaataacaagcttatgctc

SEQ ID NO: 5905 - DNA, 21 bp, Influenza A
gaaacctttgttaatgtaccg

SEQ ID NO: 5906 - DNA, 22 bp, Influenza A
gaatgtgcaaaacaactatacc

SEQ ID NO: 5907 - DNA, 20 bp, Influenza A
gagacctttgtcaatgtcac

SEQ ID NO: 5908 - DNA, 24 bp, Influenza A
gataacaagtttatgctcaatatg

SEQ ID NO: 5909 - DNA, 21 bp, Influenza A
gctcctcaaaataacaagttt

SEQ ID NO: 5910 - DNA, 18 bp, Influenza A
gctcctcccgataacaag

SEQ ID NO: 5911 - DNA, 20 bp, Influenza A
taggtagtgccagtattgta

SEQ ID NO: 5912 - DNA, 22 bp, Influenza A
tattaacaacaatagggttgct

SEQ ID NO: 5913 - DNA, 18 bp, Influenza A
tcaatgtcaccaatgtgc

SEQ ID NO: 5914 - DNA, 15 bp, Influenza A
tgaccctcagccccc

SEQ ID NO: 5915 - DNA, 26 bp, Influenza A
tgctagtattatattaacaacaatag

SEQ ID NO: 5916 - DNA, 19 bp, Influenza A
tgctcaatatggtttagcc

SEQ ID NO: 5917 - DNA, 17 bp, Influenza A
tgtccacgaacacaaca

SEQ ID NO: 5918 - DNA, 19 bp, Influenza A
ttaacaacaataggcctgc

SEQ ID NO: 5919 - DNA, 20 bp, Influenza A
ttaatgtaccgaatgtgcaa

SEQ ID NO: 5920 - DNA, 23 bp, Influenza A
ttactataaatgagacctttgtc

SEQ ID NO: 5921 - DNA, 24 bp, Influenza A
aacaaagtacatatctgtaatacg

SEQ ID NO: 5922 - DNA, 23 bp, Influenza A
aacaacaccatatatttgaatca

SEQ ID NO: 5923 - DNA, 18 bp, Influenza A
aacaacacggaacctctc

SEQ ID NO: 5924 - DNA, 18 bp, Influenza A
aacaattggctcagcatc

SEQ ID NO: 5925 - DNA, 15 bp, Influenza A
aacaccaccgaggtc

SEQ ID NO: 5926 - DNA, 18 bp, Influenza A
aacacggaacctctctgt

SEQ ID NO: 5927 - DNA, 21 bp, Influenza A
aaccaaagacaacaaagtaca

SEQ ID NO: 5928 - DNA, 22 bp, Influenza A
aatacgactgaggtgtataatg

SEQ ID NO: 5929 - DNA, 22 bp, Influenza A
aatatcagtgacaaaagaaagc

SEQ ID NO: 5930 - DNA, 22 bp, Influenza A
acaatatcagtaaccaaagaca

SEQ ID NO: 5931 - DNA, 19 bp, Influenza A
acattcttcttcatgtggc

SEQ ID NO: 5932 - DNA, 19 bp, Influenza A
acctggggaacaatatcag

SEQ ID NO: 5933 - DNA, 17 bp, Influenza A
acgaccgaggcgtataa

SEQ ID NO: 5934 - DNA, 17 bp, Influenza A
acgggacaagaacaggt

SEQ ID NO: 5935 - DNA, 18 bp, Influenza A
agaacaggtcaagagggc

SEQ ID NO: 5936 - DNA, 22 bp, Influenza A
agacaacaaagtacatatctgt

SEQ ID NO: 5937 - DNA, 19 bp, Influenza A
agagtggaaacagtggtaa

SEQ ID NO: 5938 - DNA, 22 bp, Influenza A
agtcattttcaacattcttctt

SEQ ID NO: 5939 - DNA, 26 bp, Influenza A
atattcaacatattgattcatattgc

SEQ ID NO: 5940 - DNA, 21 bp, Influenza A
atatttgaatcatgagccaga

SEQ ID NO: 5941 - DNA, 24 bp, Influenza A
atcaataaccttgggaataatatc

SEQ ID NO: 5942 - DNA, 18 bp, Influenza A
atccctgtcaacaacacc

SEQ ID NO: 5943 - DNA, 20 bp, Influenza A
atcgttgggattagtcattt

SEQ ID NO: 5944 - DNA, 17 bp, Influenza A
atcgtttccaacggaca

SEQ ID NO: 5945 - DNA, 19 bp, Influenza A
atctgtaatacgaccgagg

SEQ ID NO: 5946 - DNA, 26 bp, Influenza A
attggaaatagttatattcaacatat

SEQ ID NO: 5947 - DNA, 18 bp, Influenza A
caaaagaaagcagcgtgc

SEQ ID NO: 5948 - DNA, 20 bp, Influenza A
caacattcttcttcatgggg

SEQ ID NO: 5949 - DNA, 16 bp, Influenza A
caacggacacgggaca

SEQ ID NO: 5950 - DNA, 18 bp, Influenza A
caagagggcacacattcg

SEQ ID NO: 5951 - DNA, 21 bp, Influenza A
caaggataatgggatcagaat

SEQ ID NO: 5952 - DNA, 17 bp, Influenza A
caggagtccctatcggg

SEQ ID NO: 5953 - DNA, 16 bp, Influenza A
cagggtgccttgctga

SEQ ID NO: 5954 - DNA, 21 bp, Influenza A
cagtaaccaaagacaacaaag

SEQ ID NO: 5955 - DNA, 18 bp, Influenza A
catatctgcaacaccacc

SEQ ID NO: 5956 - DNA, 19 bp, Influenza A
catgagccagaattcctca

SEQ ID NO: 5957 - DNA, 21 bp, Influenza A
cattgatgagtgtaccattgg

SEQ ID NO: 5958 - DNA, 21 bp, Influenza A
ccataggaacaatatcagtga

SEQ ID NO: 5959 - DNA, 18 bp, Influenza A
cctatcgggcattgatga

SEQ ID NO: 5960 - DNA, 19 bp, Influenza A
cctctctgtgatgtatcgg

SEQ ID NO: 5961 - DNA, 15 bp, Influenza A
cgaaacggcgagagc

SEQ ID NO: 5962 - DNA, 18 bp, Influenza A
cgggatttgccattgttt

SEQ ID NO: 5963 - DNA, 19 bp, Influenza A
cgtcaacaacaccatacat

SEQ ID NO: 5964 - DNA, 20 bp, Influenza A
cgttgggattagtcattttc

SEQ ID NO: 5965 - DNA, 17 bp, Influenza A
ctcagcatcgttgggat

SEQ ID NO: 5966 - DNA, 19 bp, Influenza A
cttcatggggcatcaataa

SEQ ID NO: 5967 - DNA, 18 bp, Influenza A
gaaacggtgagagtggaa

SEQ ID NO: 5968 - DNA, 20 bp, Influenza A
gaacctctctgtgatgtatc

SEQ ID NO: 5969 - DNA, 19 bp, Influenza A
gaattcctcaacaacacgg

SEQ ID NO: 5970 - DNA, 19 bp, Influenza A
gagagccctttgtatcttg

SEQ ID NO: 5971 - DNA, 19 bp, Influenza A
gagccagaattcctcaaca

SEQ ID NO: 5972 - DNA, 18 bp, Influenza A
gatgtatcgggattcgcc

SEQ ID NO: 5973 - DNA, 18 bp, Influenza A
gcatcaataacctgggga

SEQ ID NO: 5974 - DNA, 20 bp, Influenza A
gcatcaatagccataggaac

SEQ ID NO: 5975 - DNA, 17 bp, Influenza A
gcgagagcggaaaaagt

SEQ ID NO: 5976 - DNA, 19 bp, Influenza A
ggaaaaagtggtaatcccc

SEQ ID NO: 5977 - DNA, 18 bp, Influenza A
ggattcgccatcgtttcc

SEQ ID NO: 5978 - DNA, 18 bp, Influenza A
ggcgtataacgaaacggc

SEQ ID NO: 5979 - DNA, 16 bp, Influenza A
ggctcagcatcgttgg

SEQ ID NO: 5980 - DNA, 23 bp, Influenza A
gggaataatatcagtaaccaaag

SEQ ID NO: 5981 - DNA, 20 bp, Influenza A
gggatcagaataggttcaag

SEQ ID NO: 5982 - DNA, 18 bp, Influenza A
ggtaatccccgtcaacaa

SEQ ID NO: 5983 - DNA, 20 bp, Influenza A
ggtgtataatgaaacggtga

SEQ ID NO: 5984 - DNA, 19 bp, Influenza A
gtgatgtatcgggatttgc

SEQ ID NO: 5985 - DNA, 17 bp, Influenza A
gtggcccttcagaatgt

SEQ ID NO: 5986 - DNA, 23 bp, Influenza A
tacatatctgtaatacgactgag

SEQ ID NO: 5987 - DNA, 18 bp, Influenza A
taggttcaagagggcaca

SEQ ID NO: 5988 - DNA, 22 bp, Influenza A
tcaaataacacagtaaaagaca

SEQ ID NO: 5989 - DNA, 18 bp, Influenza A
tcgaatcatgagccagaa

SEQ ID NO: 5990 - DNA, 17 bp, Influenza A
tcttaacgcagggtgcc

SEQ ID NO: 5991 - DNA, 22 bp, Influenza A
tgattcatattgcatcaatagc

SEQ ID NO: 5992 - DNA, 19 bp, Influenza A
tgtaccattgggatcctct

SEQ ID NO: 5993 - DNA, 23 bp, Influenza A
ttagtcattttcaacattcttct

SEQ ID NO: 5994 - DNA, 20 bp, Influenza A
ttcatgtggcatcaataacc

SEQ ID NO: 5995 - DNA, 18 bp, Influenza A
ttgtatcttgtggccctt

SEQ ID NO: 5996 - DNA, 21 bp, Influenza A
catattctgtcgaaagacaac

SEQ ID NO: 5997 - DNA, 21 bp, Influenza A
tgctcatatactagtcacaag

SEQ ID NO: 5998 - DNA, 19 bp, Influenza A
tgtgaagtaaactcatggc

SEQ ID NO: 5999 - DNA, 20 bp, Influenza A
aacgcaataaggataggtga

SEQ ID NO: 6000 - DNA, 20 bp, Influenza A
taagctcatggcatattctg

SEQ ID NO: 6001 - DNA, 20 bp, Influenza A
aactcatggcatattctgtc

SEQ ID NO: 6002 - DNA, 22 bp, Influenza A
aggatgctcatatactattcac

SEQ ID NO: 6003 - DNA, 18 bp, Influenza A
gagccctacttgtcctgt

SEQ ID NO: 6004 - DNA, 17 bp, Influenza A
caagggagccctacttg

SEQ ID NO: 6005 - DNA, 17 bp, Influenza A
gccctacttgtcctgtg

SEQ ID NO: 6006 - DNA, 16 bp, Influenza A
gacccacaaggctgca

SEQ ID NO: 6007 - DNA, 16 bp, Influenza A
ccacaaggctgcagga

SEQ ID NO: 6008 - DNA, 18 bp, Influenza A
aacgcaataaggatgggt

SEQ ID NO: 6009 - DNA, 20 bp, Influenza A
agtaaactcatggcacattc

SEQ ID NO: 6010 - DNA, 19 bp, Influenza A
agtaaactcatggcacatc

SEQ ID NO: 6011 - DNA, 21 bp, Influenza A
gaagataatatgcatctcagc

SEQ ID NO: 6012 - DNA, 21 bp, Influenza A
aatgacactatccgtagtaag

SEQ ID NO: 6013 - DNA, 23 bp, Influenza A
gaatgacactatctgtagtaagt

SEQ ID NO: 6014 - DNA, 23 bp, Influenza A
tagtaagtctgctaataggattg

SEQ ID NO: 6015 - DNA, 21 bp, Influenza A
gaatgacactatcggtagtaa

SEQ ID NO: 6016 - DNA, 20 bp, Influenza A
acactatccgtagtaagtct

SEQ ID NO: 6017 - DNA, 20 bp, Influenza A
ggaatgacactatcggtagt

SEQ ID NO: 6018 - DNA, 20 bp, Influenza A
aggaatgacactatcggtag

SEQ ID NO: 6019 - DNA, 24 bp, Influenza A
tattgtgttaatcaaagaagaaaa

SEQ ID NO: 6020 - DNA, 18 bp, Influenza A
ctcagcaacaggaatgac

SEQ ID NO: 6021 - DNA, 20 bp, Influenza A
tccgtagtaagtctgctaat

SEQ ID NO: 6022 - DNA, 20 bp, Influenza A
atccgtagtaagtctgctaa

SEQ ID NO: 6023 - DNA, 20 bp, Influenza A
ccacaaccacaataatcaac

SEQ ID NO: 6024 - DNA, 21 bp, Influenza A
cttcatttcaaggtaggagaa

SEQ ID NO: 6025 - DNA, 20 bp, Influenza A
agtctgctaataggattggc

SEQ ID NO: 6026 - DNA, 20 bp, Influenza A
aatgagacaaactccacaac

SEQ ID NO: 6027 - DNA, 24 bp, Influenza A
tattgtgttaatcaaagaagaaga

SEQ ID NO: 6028 - DNA, 20 bp, Influenza A
aaactccacaaccacaataa

SEQ ID NO: 6029 - DNA, 19 bp, Influenza A
tcagctacaggaatgacac

SEQ ID NO: 6030 - DNA, 20 bp, Influenza A
aactcatggcacattctatc

SEQ ID NO: 6031 - DNA, 20 bp, Influenza A
catttcaaggtaggagacat

SEQ ID NO: 6032 - DNA, 19 bp, Influenza A
gtctgctaataggattggc

SEQ ID NO: 6033 - DNA, 21 bp, Influenza A
ccaaaacaatttcacaaatgt

SEQ ID NO: 6034 - DNA, 20 bp, Influenza A
gaactcatggcacattctat

SEQ ID NO: 6035 - DNA, 18 bp, Influenza A
gacaaactccacaaccac

SEQ ID NO: 6036 - DNA, 18 bp, Influenza A
agacaaactccacaacca

SEQ ID NO: 6037 - DNA, 18 bp, Influenza A
caaactccacaaccacaa

SEQ ID NO: 6038 - DNA, 21 bp, Influenza A
taagtcagctaataggattgg

SEQ ID NO: 6039 - DNA, 22 bp, Influenza A
cattaataagttgggaaatggg

SEQ ID NO: 6040 - DNA, 20 bp, Influenza A
tagtatgcatctcagcaaca

SEQ ID NO: 6041 - DNA, 17 bp, Influenza A
ctacttgtcctgcgacc

SEQ ID NO: 6042 - DNA, 20 bp, Influenza A
cacaaccacgataatcaact

SEQ ID NO: 6043 - DNA, 21 bp, Influenza A
caaaatgttcacaaacctttc

SEQ ID NO: 6044 - DNA, 21 bp, Influenza A
acaaaatgttcacaaaccttt

SEQ ID NO: 6045 - DNA, 21 bp, Influenza A
ttaataagttgggaaatgggg

SEQ ID NO: 6046 - DNA, 20 bp, Influenza A
gaacattgggcttcatttca

SEQ ID NO: 6047 - DNA, 20 bp, Influenza A
ctatccgtagtaagtcagct

SEQ ID NO: 6048 - DNA, 22 bp, Influenza A
gtttagggcattaataagttgg

SEQ ID NO: 6049 - DNA, 21 bp, Influenza A
ttaataagttgggaaatggga

SEQ ID NO: 6050 - DNA, 22 bp, Influenza A
ttttagggcattaataagttgg

SEQ ID NO: 6051 - DNA, 20 bp, Influenza A
cacattctatccaaggacaa

SEQ ID NO: 6052 - DNA, 20 bp, Influenza A
actatacatgacagaagccc

SEQ ID NO: 6053 - DNA, 20 bp, Influenza A
taataagttgggaaatgggg

SEQ ID NO: 6054 - DNA, 20 bp, Influenza A
caactacaacacccaaaaca

SEQ ID NO: 6055 - DNA, 20 bp, Influenza A
gctatccgtagtaagtatgc

SEQ ID NO: 6056 - DNA, 19 bp, Influenza A
aacattgggcttcatttca

SEQ ID NO: 6057 - DNA, 19 bp, Influenza A
gcacattctatccaaggac

SEQ ID NO: 6058 - DNA, 19 bp, Influenza A
ctcatggcacattctatcc

SEQ ID NO: 6059 - DNA, 20 bp, Influenza A
cacaaacctttctaaaccct

SEQ ID NO: 6060 - DNA, 20 bp, Influenza A
catatctctcatgtggacca

SEQ ID NO: 6061 - DNA, 20 bp, Influenza A
atatctctcatgtggaccac

SEQ ID NO: 6062 - DNA, 20 bp, Influenza A
actacaacacccaaaacaac

SEQ ID NO: 6063 - DNA, 19 bp, Influenza A
tatacatgacagaagcccg

SEQ ID NO: 6064 - DNA, 21 bp, Influenza A
ccgtttagggcattaataagt

SEQ ID NO: 6065 - DNA, 18 bp, Influenza A
aggaatgacgctatccgt

SEQ ID NO: 6066 - DNA, 19 bp, Influenza A
gtaggagacacaccagaaa

SEQ ID NO: 6067 - DNA, 19 bp, Influenza A
gcaccaatgagacaaactc

SEQ ID NO: 6068 - DNA, 18 bp, Influenza A
atacatgacagaagcccg

SEQ ID NO: 6069 - DNA, 18 bp, Influenza A
cgagtgcagaatgtttgc

SEQ ID NO: 6070 - DNA, 20 bp, Influenza A
tgcgattagaataggagagg

SEQ ID NO: 6071 - DNA, 17 bp, Influenza A
gtcggcatgcaaatggg

SEQ ID NO: 6072 - DNA, 17 bp, Influenza A
ccaacttggggctgaac

SEQ ID NO: 6073 - DNA, 19 bp, Influenza A
tcacaaacctttctaagcc

SEQ ID NO: 6074 - DNA, 22 bp, Influenza A
cttttagggcgttaataagttg

SEQ ID NO: 6075 - DNA, 19 bp, Influenza A
tcacaagagaaccatacct

SEQ ID NO: 6076 - DNA, 19 bp, Influenza A
tttcaaaacccttgtgtga

SEQ ID NO: 6077 - DNA, 18 bp, Influenza A
taggagaagatgcccaca

SEQ ID NO: 6078 - DNA, 18 bp, Influenza A
cctagcaccaatgagaca

SEQ ID NO: 6079 - DNA, 18 bp, Influenza A
ataggagaggatgcccac

SEQ ID NO: 6080 - DNA, 19 bp, Influenza A
acaaacctttctaagccct

SEQ ID NO: 6081 - DNA, 16 bp, Influenza A
gggtcggcatgcaaat

SEQ ID NO: 6082 - DNA, 19 bp, Influenza A
taaacccttgtgtgaggtg

SEQ ID NO: 6083 - DNA, 17 bp, Influenza A
gatgcccacatccttgt

SEQ ID NO: 6084 - DNA, 17 bp, Influenza A
cccacatccttgtcaca

SEQ ID NO: 6085 - DNA, 17 bp, Influenza A
actaaggggtcggcatg

SEQ ID NO: 6086 - DNA, 19 bp, Influenza A
caaggtaccacactaaggg

SEQ ID NO: 6087 - DNA, 17 bp, Influenza A
aatgtttgccctcagcc

SEQ ID NO: 6088 - DNA, 17 bp, Influenza A
caccacactaaggggtc

SEQ ID NO: 6089 - DNA, 17 bp, Influenza A
agatgcccacatccttg

SEQ ID NO: 6090 - DNA, 18 bp, Influenza A
agaagatgcccacatcct

SEQ ID NO: 6091 - DNA, 16 bp, Influenza A
taaggggtcggcatgc

SEQ ID NO: 6092 - DNA, 16 bp, Influenza A
ggaaatggggcaagca

SEQ ID NO: 6093 - DNA, 16 bp, Influenza A
acactaaggggtcggc

SEQ ID NO: 6094 - DNA, 16 bp, Influenza A
atgtttgccctcagcc

SEQ ID NO: 6095 - DNA, 19 bp, Influenza A
aaccatatctctcgtgtgg

SEQ ID NO: 6096 - DNA, 17 bp, Influenza A
cgcatgagtgcagaatg

SEQ ID NO: 6097 - DNA, 18 bp, Influenza A
ggaaacaggaacccctag

SEQ ID NO: 6098 - DNA, 17 bp, Influenza A
gaccacatgagtgcaga

SEQ ID NO: 6099 - DNA, 20 bp, Influenza A
cattgggattcatttcaagg

SEQ ID NO: 6100 - DNA, 19 bp, Influenza A
ccctagtaccaatgagaca

SEQ ID NO: 6101 - DNA, 18 bp, Influenza A
cccctagcatcaatgaga

SEQ ID NO: 6102 - DNA, 15 bp, Influenza A
tgccctcagccaagg

SEQ ID NO: 6103 - DNA, 19 bp, Influenza A
aacaggaacccctagtacc

SEQ ID NO: 6104 - DNA, 17 bp, Influenza A
taggagacacaccggaa

SEQ ID NO: 6105 - DNA, 20 bp, Influenza A
ttagaataggagaggatgcc

SEQ ID NO: 6106 - DNA, 19 bp, Influenza A
taggagacataccggaaac

SEQ ID NO: 6107 - DNA, 19 bp, Influenza A
agaataggagaggatgccc

SEQ ID NO: 6108 - DNA, 15 bp, Influenza A
gccaaggcaccacac

SEQ ID NO: 6109 - DNA, 18 bp, Influenza A
taccggaaacaggaaccc

SEQ ID NO: 6110 - DNA, 19 bp, Influenza A
aggtaggagaaacaccaga

SEQ ID NO: 6111 - DNA, 17 bp, Influenza A
acaccggaaacaggaac

SEQ ID NO: 6112 - DNA, 16 bp, Influenza A
gggctgaacattgggc

SEQ ID NO: 6113 - DNA, 17 bp, Influenza A
gggctgaacattgggat

SEQ ID NO: 6114 - DNA, 21 bp, Influenza A
ttaaacatcggactccattat

SEQ ID NO: 6115 - DNA, 21 bp, Influenza A
ataggaattgccaatttaggt

SEQ ID NO: 6116 - DNA, 20 bp, Influenza A
ttaaacatcggactccatga

SEQ ID NO: 6117 - DNA, 24 bp, Influenza A
tactgaacttattgataggaatct

SEQ ID NO: 6118 - DNA, 23 bp, Influenza A
gaacttattgataggaatctcaa

SEQ ID NO: 6119 - DNA, 23 bp, Influenza A
tagtagaaaacacatacgtaaat

SEQ ID NO: 6120 - DNA, 22 bp, Influenza A
aaactatttgcattatctggag

SEQ ID NO: 6121 - DNA, 21 bp, Influenza A
attatctggagtggcaatagc

SEQ ID NO: 6122 - DNA, 22 bp, Influenza A
caacaataattaccaagggaac

SEQ ID NO: 6123 - DNA, 21 bp, Influenza A
aacaggaggagaatttaacat

SEQ ID NO: 6124 - DNA, 19 bp, Influenza A
ggatgcaaaatgtatgcct

SEQ ID NO: 6125 - DNA, 20 bp, Influenza A
gaatttaacatgcacgacca

SEQ ID NO: 6126 - DNA, 22 bp, Influenza A
aaacaagaggagaatttaacat

SEQ ID NO: 6127 - DNA, 24 bp, Influenza A
gtatctctacatctaaaggaaaaa

SEQ ID NO: 6128 - DNA, 18 bp, Influenza A
gatttggggaaagcgaac

SEQ ID NO: 6129 - DNA, 23 bp, Influenza A
tctctacatctaaaggaaaaagg

SEQ ID NO: 6130 - DNA, 19 bp, Influenza A
agtcgcaatagcacttagt

SEQ ID NO: 6131 - DNA, 22 bp, Influenza A
gattgaacgtatctctacatct

SEQ ID NO: 6132 - DNA, 21 bp, Influenza A
cattacccaaaacaacactac

SEQ ID NO: 6133 - DNA, 21 bp, Influenza A
aaacacatacgtcaataacac

SEQ ID NO: 6134 - DNA, 19 bp, Influenza A
gccatatgtatcatgcgac

SEQ ID NO: 6135 - DNA, 21 bp, Influenza A
aattaccaagggaactgattt

SEQ ID NO: 6136 - DNA, 18 bp, Influenza A
tgggtcgtgatagcaaaa

SEQ ID NO: 6137 - DNA, 20 bp, Influenza A
tgataggaatctcaaacgtc

SEQ ID NO: 6138 - DNA, 20 bp, Influenza A
ggaactgatttgaaaacacc

SEQ ID NO: 6139 - DNA, 20 bp, Influenza A
cggattgaacgtatctctac

SEQ ID NO: 6140 - DNA, 20 bp, Influenza A
aaaggaaaaaggacccaaac

SEQ ID NO: 6141 - DNA, 20 bp, Influenza A
agttgcaaaatgtatgctct

SEQ ID NO: 6142 - DNA, 19 bp, Influenza A
tgcacgaccattaatcaaa

SEQ ID NO: 6143 - DNA, 19 bp, Influenza A
gctatctgctgttgaacaa

SEQ ID NO: 6144 - DNA, 17 bp, Influenza A
accagggagccatatgt

SEQ ID NO: 6145 - DNA, 19 bp, Influenza A
aagctatctgctgttgaac

SEQ ID NO: 6146 - DNA, 23 bp, Influenza A
cttagtgtattgaacctattgat

SEQ ID NO: 6147 - DNA, 18 bp, Influenza A
tgttgaacaagagcctgt

SEQ ID NO: 6148 - DNA, 18 bp, Influenza A
tgcaatgttgaagggtgg

SEQ ID NO: 6149 - DNA, 18 bp, Influenza A
caaacgtcggattgaacg

SEQ ID NO: 6150 - DNA, 25 bp, Influenza A
ggaatatccaatatgagtttaaata

SEQ ID NO: 6151 - DNA, 19 bp, Influenza A
caggatgcaagatgtatgc

SEQ ID NO: 6152 - DNA, 17 bp, Influenza A
caagagcctgtgcaatg

SEQ ID NO: 6153 - DNA, 17 bp, Influenza A
atcatgcgacccaacag

SEQ ID NO: 6154 - DNA, 17 bp, Influenza A
acccaacaggatgcaaa

SEQ ID NO: 6155 - DNA, 25 bp, Influenza A
acaataattgacaaaaatacaaaga

SEQ ID NO: 6156 - DNA, 27 bp, Influenza A
caataattgacaaaaatacaaaaatag

SEQ ID NO: 6157 - DNA, 22 bp, Influenza A
taatcaaaaactctttgcatca

SEQ ID NO: 6158 - DNA, 16 bp, Influenza A
ttgaagggtgggtcgt

SEQ ID NO: 6159 - DNA, 22 bp, Influenza A
caataacgcaacaataattgac

SEQ ID NO: 6160 - DNA, 23 bp, Influenza A
actaataggaatatccaatgtgg

SEQ ID NO: 6161 - DNA, 23 bp, Influenza A
tatctctatactcaaaaggagaa

SEQ ID NO: 6162 - DNA, 23 bp, Influenza A
caacaataattgacaaaagtaca

SEQ ID NO: 6163 - DNA, 19 bp, Influenza A
ccctggttatctactgctg

SEQ ID NO: 6164 - DNA, 20 bp, Influenza A
catccggaatagcaatagtg

SEQ ID NO: 6165 - DNA, 21 bp, Influenza A
ctgctgaacaaaagtctatgc

SEQ ID NO: 6166 - DNA, 20 bp, Influenza A
aacatgcacaaatatcaacc

SEQ ID NO: 6167 - DNA, 21 bp, Influenza A
tagaaaaccctggttatctac

SEQ ID NO: 6168 - DNA, 20 bp, Influenza A
tctactgctgaacaaaagtc

SEQ ID NO: 6169 - DNA, 21 bp, Influenza A
taaacacgtacatcaataacg

SEQ ID NO: 6170 - DNA, 23 bp, Influenza A
tgatcctctaagttgtaaaatgt

SEQ ID NO: 6171 - DNA, 23 bp, Influenza A
cgaacaaatcatagtaactagag

SEQ ID NO: 6172 - DNA, 23 bp, Influenza A
aaagcgaacaaattatagtaact

SEQ ID NO: 6173 - DNA, 21 bp, Influenza A
tacaatcagaaacaagcattc

SEQ ID NO: 6174 - DNA, 20 bp, Influenza A
tctcatgtgatcctctaagt

SEQ ID NO: 6175 - DNA, 20 bp, Influenza A
atgtctcatgtgatcctcta

SEQ ID NO: 6176 - DNA, 19 bp, Influenza A
aaaaggagaaagccacaag

SEQ ID NO: 6177 - DNA, 19 bp, Influenza A
tggaacgattcatgacaga

SEQ ID NO: 6178 - DNA, 20 bp, Influenza A
tcaaaaggagaaaaccacaa

SEQ ID NO: 6179 - DNA, 19 bp, Influenza A
agggactaccattaggaac

SEQ ID NO: 6180 - DNA, 20 bp, Influenza A
aacaaaagtctatgcaacgt

SEQ ID NO: 6181 - DNA, 20 bp, Influenza A
tcctctaagttgcaaaatgt

SEQ ID NO: 6182 - DNA, 18 bp, Influenza A
cttgcaccaagggactac

SEQ ID NO: 6183 - DNA, 24 bp, Influenza A
acaaatatcaatcaaaacaatacc

SEQ ID NO: 6184 - DNA, 23 bp, Influenza A
gttgataggaatttcaaatgttg

SEQ ID NO: 6185 - DNA, 19 bp, Influenza A
aggatgggttgtaatagca

SEQ ID NO: 6186 - DNA, 22 bp, Influenza A
aaaaatacaaagatggagaacc

SEQ ID NO: 6187 - DNA, 21 bp, Influenza A
taggaatttcaaatgttggac

SEQ ID NO: 6188 - DNA, 21 bp, Influenza A
tggactgaatgtatctctaca

SEQ ID NO: 6189 - DNA, 20 bp, Influenza A
aaatgttggactgaatgtgt

SEQ ID NO: 6190 - DNA, 19 bp, Influenza A
gtatgccctacatcaaggt

SEQ ID NO: 6191 - DNA, 25 bp, Influenza A
tagggataataaatcttctcatagg

SEQ ID NO: 6192 - DNA, 24 bp, Influenza A
gacaaaagtacaaaaatagaaaac

SEQ ID NO: 6193 - DNA, 23 bp, Influenza A
aaatacaaaaatagaaaaccctg

SEQ ID NO: 6194 - DNA, 21 bp, Influenza A
tccaagctacttgctattaaa

SEQ ID NO: 6195 - DNA, 21 bp, Influenza A
gttgtaaaatgtatgccctac

SEQ ID NO: 6196 - DNA, 21 bp, Influenza A
ataattaccaaggaaccagat

SEQ ID NO: 6197 - DNA, 21 bp, Influenza A
aaagccacaagaataataacc

SEQ ID NO: 6198 - DNA, 20 bp, Influenza A
tctactccattaggtagccc

SEQ ID NO: 6199 - DNA, 20 bp, Influenza A
caaatagtaccacacacgac

SEQ ID NO: 6200 - DNA, 20 bp, Influenza A
acatcaaggtacaacaatca

SEQ ID NO: 6201 - DNA, 20 bp, Influenza A
aatgcaattagatttgggga

SEQ ID NO: 6202 - DNA, 19 bp, Influenza A
cgatagaacagccttcaga

SEQ ID NO: 6203 - DNA, 19 bp, Influenza A
aggaaccagatttgaaagc

SEQ ID NO: 6204 - DNA, 19 bp, Influenza A
actatctggagtcgcaata

SEQ ID NO: 6205 - DNA, 18 bp, Influenza A
gggctcatttctactcca

SEQ ID NO: 6206 - DNA, 18 bp, Influenza A
ccgagggctcatttctac

SEQ ID NO: 6207 - DNA, 18 bp, Influenza A
atgcagtgttgagggatg

SEQ ID NO: 6208 - DNA, 17 bp, Influenza A
taggtagccccccaaca

SEQ ID NO: 6209 - DNA, 17 bp, Influenza A
cagaacagccttccgag

SEQ ID NO: 6210 - DNA, 16 bp, Influenza A
ttgaggggtgggttgt

SEQ ID NO: 6211 - DNA, 18 bp, Influenza A
caaaaggggaaagccaca

SEQ ID NO: 6212 - DNA, 23 bp, Influenza A
gttctcaacttactaataggaat

SEQ ID NO: 6213 - DNA, 22 bp, Influenza A
acacttaaagaacaacaatgat

SEQ ID NO: 6214 - DNA, 21 bp, Influenza A
ctctacacttaaaaggagagg

SEQ ID NO: 6215 - DNA, 21 bp, Influenza A
acaacaatgatcaggataaga

SEQ ID NO: 6216 - DNA, 21 bp, Influenza A
aaggaactaccataaggaaca

SEQ ID NO: 6217 - DNA, 22 bp, Influenza A
gggaatacaatgaaacagtaag

SEQ ID NO: 6218 - DNA, 23 bp, Influenza A
aatacaatgaaacagtaaggatt

SEQ ID NO: 6219 - DNA, 21 bp, Influenza A
agggaatacaatgaaacagta

SEQ ID NO: 6220 - DNA, 22 bp, Influenza A
aatggaataagaattggatcga

SEQ ID NO: 6221 - DNA, 23 bp, Influenza A
atacaatgaaacagtaaggattg

SEQ ID NO: 6222 - DNA, 23 bp, Influenza A
tacaatgaaacagtaaggataga

SEQ ID NO: 6223 - DNA, 22 bp, Influenza A
gggtcatgtttttgttataagg

SEQ ID NO: 6224 - DNA, 20 bp, Influenza A
caatggcacaataccaatgt

SEQ ID NO: 6225 - DNA, 20 bp, Influenza A
taacacaatggcacaatacc

SEQ ID NO: 6226 - DNA, 22 bp, Influenza A
acatgtttttgttataagggag

SEQ ID NO: 6227 - DNA, 20 bp, Influenza A
atcgagaggtcatgtttttg

SEQ ID NO: 6228 - DNA, 19 bp, Influenza A
acaatggcacaataccaat

SEQ ID NO: 6229 - DNA, 22 bp, Influenza A
ttgagtatatagagagaccaga

SEQ ID NO: 6230 - DNA, 21 bp, Influenza A
aacggaataagaattggatcg

SEQ ID NO: 6231 - DNA, 20 bp, Influenza A
tccctactcaatgacaaaca

SEQ ID NO: 6232 - DNA, 26 bp, Influenza A
ttaatattctcctacatatagttagc

SEQ ID NO: 6233 - DNA, 20 bp, Influenza A
cggaataagaattggatcga

SEQ ID NO: 6234 - DNA, 21 bp, Influenza A
tcaatggcacaatactaatgt

SEQ ID NO: 6235 - DNA, 21 bp, Influenza A
aataagaattggatcgagagg

SEQ ID NO: 6236 - DNA, 25 bp, Influenza A
gtccttaatattctcctacatatag

SEQ ID NO: 6237 - DNA, 25 bp, Influenza A
tccttaatattctcctacatatagt

SEQ ID NO: 6238 - DNA, 21 bp, Influenza A
tgtttttgttataagggagcc

SEQ ID NO: 6239 - DNA, 19 bp, Influenza A
cgagaggtcatgtttttgt

SEQ ID NO: 6240 - DNA, 22 bp, Influenza A
agagtacaatgaaacagtaaga

SEQ ID NO: 6241 - DNA, 21 bp, Influenza A
ctcaatggcacaatactaatg

SEQ ID NO: 6242 - DNA, 23 bp, Influenza A
ataagagaatacaatgaaacagt

SEQ ID NO: 6243 - DNA, 19 bp, Influenza A
cattctaatggcacagtga

SEQ ID NO: 6244 - DNA, 26 bp, Influenza A
caatactaatgtcattgagtatatag

SEQ ID NO: 6245 - DNA, 24 bp, Influenza A
tataatgaaacagtaaggattgaa

SEQ ID NO: 6246 - DNA, 25 bp, Influenza A
acatatagttagcattacaataaca

SEQ ID NO: 6247 - DNA, 22 bp, Influenza A
ttataagggaaccatttgtttc

SEQ ID NO: 6248 - DNA, 23 bp, Influenza A
ttaggattggtagtccttaatat

SEQ ID NO: 6249 - DNA, 23 bp, Influenza A
actctaatgagtgtagaaatagg

SEQ ID NO: 6250 - DNA, 24 bp, Influenza A
tatagttagcattacaataacagt

SEQ ID NO: 6251 - DNA, 23 bp, Influenza A
ttctcctacatatagttagcatt

SEQ ID NO: 6252 - DNA, 22 bp, Influenza A
ttggtagtccttaatattctcc

SEQ ID NO: 6253 - DNA, 22 bp, Influenza A
acaatgaaacagtaagagtaga

SEQ ID NO: 6254 - DNA, 22 bp, Influenza A
agagagtacaatgaaacagtaa

SEQ ID NO: 6255 - DNA, 23 bp, Influenza A
agtccttaatattctcctacata

SEQ ID NO: 6256 - DNA, 24 bp, Influenza A
atgtcattgagtatatagagaaac

SEQ ID NO: 6257 - DNA, 23 bp, Influenza A
aatgtcattgagtacatagaaag

SEQ ID NO: 6258 - DNA, 21 bp, Influenza A
acagtcattagggaatacaat

SEQ ID NO: 6259 - DNA, 23 bp, Influenza A
atagttagcattacaataacagt

SEQ ID NO: 6260 - DNA, 22 bp, Influenza A
aggattggtagtccttaatatt

SEQ ID NO: 6261 - DNA, 20 bp, Influenza A
aataagaattggatcgaggg

SEQ ID NO: 6262 - DNA, 22 bp, Influenza A
aattcaatggcacaatactagt

SEQ ID NO: 6263 - DNA, 20 bp, Influenza A
caatggcacaatactagtgt

SEQ ID NO: 6264 - DNA, 19 bp, Influenza A
atggcacaataccaatgtc

SEQ ID NO: 6265 - DNA, 19 bp, Influenza A
gaaggtaacacaatggcac

SEQ ID NO: 6266 - DNA, 22 bp, Influenza A
atacaatgagacagtaaggatt

SEQ ID NO: 6267 - DNA, 20 bp, Influenza A
gtgtagaaatagggcaatca

SEQ ID NO: 6268 - DNA, 22 bp, Influenza A
tatatagagagaccagagagtg

SEQ ID NO: 6269 - DNA, 21 bp, Influenza A
cataagggaaccatttgtttc

SEQ ID NO: 6270 - DNA, 18 bp, Influenza A
aggtaacacaatggcaca

SEQ ID NO: 6271 - DNA, 23 bp, Influenza A
caatgaaacagtaagagtagaaa

SEQ ID NO: 6272 - DNA, 24 bp, Influenza A
tgtcattgagtatatagagaaatt

SEQ ID NO: 6273 - DNA, 20 bp, Influenza A
acatgaacaatacagaagca

SEQ ID NO: 6274 - DNA, 24 bp, Influenza A
gagtgatcattttatgaacaatac

SEQ ID NO: 6275 - DNA, 20 bp, Influenza A
taagaattggatcgagaggc

SEQ ID NO: 6276 - DNA, 20 bp, Influenza A
agggaatacaatgagacagt

SEQ ID NO: 6277 - DNA, 21 bp, Influenza A
gtacaatgaaacagtgagagt

SEQ ID NO: 6278 - DNA, 19 bp, Influenza A
aagaattggatcgagaggt

SEQ ID NO: 6279 - DNA, 21 bp, Influenza A
gacagtcattagggaatacaa

SEQ ID NO: 6280 - DNA, 23 bp, Influenza A
aatgaaacagtaagagtagaaag

SEQ ID NO: 6281 - DNA, 20 bp, Influenza A
ccaaagacaacggaataaga

SEQ ID NO: 6282 - DNA, 21 bp, Influenza A
aaaggagtacaatgaaacagt

SEQ ID NO: 6283 - DNA, 20 bp, Influenza A
gaataagaattgggtcgagg

SEQ ID NO: 6284 - DNA, 21 bp, Influenza A
atcagagagtgatcatttcat

SEQ ID NO: 6285 - DNA, 20 bp, Influenza A
gaaccatttgtttcttgctc

SEQ ID NO: 6286 - DNA, 22 bp, Influenza A
gttagcattacaataacagtgt

SEQ ID NO: 6287 - DNA, 21 bp, Influenza A
tgaaacagtcattagggaata

SEQ ID NO: 6288 - DNA, 19 bp, Influenza A
ggaaccatttgtttcttgc

SEQ ID NO: 6289 - DNA, 20 bp, Influenza A
gaccagagagtgatcatttc

SEQ ID NO: 6290 - DNA, 19 bp, Influenza A
ctctaatggcacagtgaaa

SEQ ID NO: 6291 - DNA, 18 bp, Influenza A
aatggcacagtgaaggac

SEQ ID NO: 6292 - DNA, 19 bp, Influenza A
caaggttccctactcaatg

SEQ ID NO: 6293 - DNA, 22 bp, Influenza A
aatgtcattgagtatgtagaga

SEQ ID NO: 6294 - DNA, 20 bp, Influenza A
gagtgtagaaatagggcaat

SEQ ID NO: 6295 - DNA, 20 bp, Influenza A
ttccctactcaatgacaagc

SEQ ID NO: 6296 - DNA, 22 bp, Influenza A
tctaatgagtgtagagataggg

SEQ ID NO: 6297 - DNA, 20 bp, Influenza A
aataagaattgggtcgaggg

SEQ ID NO: 6298 - DNA, 21 bp, Influenza A
atgaacaatacagaaccattg

SEQ ID NO: 6299 - DNA, 19 bp, Influenza A
ccatttgtttcttgctcgc

SEQ ID NO: 6300 - DNA, 21 bp, Influenza A
gaatacaatgagacagtacgg

SEQ ID NO: 6301 - DNA, 20 bp, Influenza A
agaccagagagtgatcattt

SEQ ID NO: 6302 - DNA, 19 bp, Influenza A
catttgtttcttgctcgcc

SEQ ID NO: 6303 - DNA, 22 bp, Influenza A
ccagagagtaatcatttcatga

SEQ ID NO: 6304 - DNA, 19 bp, Influenza A
cattgtgtgatgctaaggg

SEQ ID NO: 6305 - DNA, 25 bp, Influenza A
catatagttagtattacaataacgg

SEQ ID NO: 6306 - DNA, 20 bp, Influenza A
acaatacagaaccattgtgt

SEQ ID NO: 6307 - DNA, 22 bp, Influenza A
atagttagcatcacaataacag

SEQ ID NO: 6308 - DNA, 19 bp, Influenza A
taagaattggatcgagggg

SEQ ID NO: 6309 - DNA, 22 bp, Influenza A
gaaacagtaaggattgaaaaga

SEQ ID NO: 6310 - DNA, 22 bp, Influenza A
aattgagtacatagagagacct

SEQ ID NO: 6311 - DNA, 18 bp, Influenza A
atttgtttcttgctcgcc

SEQ ID NO: 6312 - DNA, 21 bp, Influenza A
ttcgttataagggaaccattt

SEQ ID NO: 6313 - DNA, 17 bp, Influenza A
ggcacagtgaaagaccg

SEQ ID NO: 6314 - DNA, 19 bp, Influenza A
tgtgatgctaagggttttg

SEQ ID NO: 6315 - DNA, 19 bp, Influenza A
gatgctaagggttttgcac

SEQ ID NO: 6316 - DNA, 17 bp, Influenza A
agggcaatcacccaatg

SEQ ID NO: 6317 - DNA, 19 bp, Influenza A
gtgtgatgctaagggtttt

SEQ ID NO: 6318 - DNA, 20 bp, Influenza A
acaatacagaagcattgtgt

SEQ ID NO: 6319 - DNA, 20 bp, Influenza A
tgagaaggtaacacaatggc

SEQ ID NO: 6320 - DNA, 18 bp, Influenza A
ttctaacggcacagtgaa

SEQ ID NO: 6321 - DNA, 20 bp, Influenza A
aggttctctactcaatgaca

SEQ ID NO: 6322 - DNA, 20 bp, Influenza A
ctccctggaaatggaaataa

SEQ ID NO: 6323 - DNA, 20 bp, Influenza A
catttgtttcttgctctcca

SEQ ID NO: 6324 - DNA, 19 bp, Influenza A
aaaaggtaacacaatggca

SEQ ID NO: 6325 - DNA, 19 bp, Influenza A
cctactcaatgacaagcac

SEQ ID NO: 6326 - DNA, 17 bp, Influenza A
gcacagtgaaagaccgg

SEQ ID NO: 6327 - DNA, 17 bp, Influenza A
cacagtgaaagaccgga

SEQ ID NO: 6328 - DNA, 19 bp, Influenza A
tgatgctaagggttttgcg

SEQ ID NO: 6329 - DNA, 20 bp, Influenza A
ctagggttggtagtccttaa

SEQ ID NO: 6330 - DNA, 18 bp, Influenza A
atgctaagggttttgcac

SEQ ID NO: 6331 - DNA, 22 bp, Influenza A
acaattgagtacatagagagac

SEQ ID NO: 6332 - DNA, 21 bp, Influenza A
gttctttcttactcaaggttc

SEQ ID NO: 6333 - DNA, 19 bp, Influenza A
cagaaccattgtgtgatgc

SEQ ID NO: 6334 - DNA, 18 bp, Influenza A
attccaatggcacagtga

SEQ ID NO: 6335 - DNA, 20 bp, Influenza A
aacagtaaggattgagaagg

SEQ ID NO: 6336 - DNA, 19 bp, Influenza A
tagagagaccagagagtga

SEQ ID NO: 6337 - DNA, 19 bp, Influenza A
tctccctggaaatggaaat

SEQ ID NO: 6338 - DNA, 21 bp, Influenza A
tagagggtgatcatttcatga

SEQ ID NO: 6339 - DNA, 21 bp, Influenza A
attgagaaggtaacacaatgg

SEQ ID NO: 6340 - DNA, 19 bp, Influenza A
gagtgtagagatagggcaa

SEQ ID NO: 6341 - DNA, 19 bp, Influenza A
aaggtaactcaatggcaca

SEQ ID NO: 6342 - DNA, 20 bp, Influenza A
tttcttactcaaggttccct

SEQ ID NO: 6343 - DNA, 18 bp, Influenza A
ggccagagagtgatcatt

SEQ ID NO: 6344 - DNA, 22 bp, Influenza A
cgagtatatagagagaccttca

SEQ ID NO: 6345 - DNA, 19 bp, Influenza A
tccttagggttggtagtcc

SEQ ID NO: 6346 - DNA, 19 bp, Influenza A
ggacgttcttccttactca

SEQ ID NO: 6347 - DNA, 21 bp, Influenza A
attgagtacatagagagacca

SEQ ID NO: 6348 - DNA, 22 bp, Influenza A
tccctagaaatggaaataatgg

SEQ ID NO: 6349 - DNA, 20 bp, Influenza A
ttgagaaggtaacacaatgg

SEQ ID NO: 6350 - DNA, 19 bp, Influenza A
ttctccctggaaatggaaa

SEQ ID NO: 6351 - DNA, 19 bp, Influenza A
tgttagttctccctggaaa

SEQ ID NO: 6352 - DNA, 21 bp, Influenza A
ttgagtatatagagaggccag

SEQ ID NO: 6353 - DNA, 17 bp, Influenza A
agtgcaggacgttcttc

SEQ ID NO: 6354 - DNA, 22 bp, Influenza A
gtcacatttttgttataaggga

SEQ ID NO: 6355 - DNA, 18 bp, Influenza A
aggtaactcaatggcaca

SEQ ID NO: 6356 - DNA, 20 bp, Influenza A
tgtctttgttataagggagc

SEQ ID NO: 6357 - DNA, 17 bp, Influenza A
gtgcaggacgttcttcc

SEQ ID NO: 6358 - DNA, 20 bp, Influenza A
gtcagtatccttagggttgg

SEQ ID NO: 6359 - DNA, 18 bp, Influenza A
ccttagggttggtagtcc

SEQ ID NO: 6360 - DNA, 18 bp, Influenza A
gttctccctggaaatgga

SEQ ID NO: 6361 - DNA, 22 bp, Influenza A
gtatatagaaagaccagagagt

SEQ ID NO: 6362 - DNA, 20 bp, Influenza A
actcaaggttctctactcaa

SEQ ID NO: 6363 - DNA, 20 bp, Influenza A
atggaaataatgggagttgc

SEQ ID NO: 6364 - DNA, 19 bp, Influenza A
gggtcagtatccttagggt

SEQ ID NO: 6365 - DNA, 21 bp, Influenza A
agtccttaatatcctcctaca

SEQ ID NO: 6366 - DNA, 17 bp, Influenza A
cagtgaaagaccggacc

SEQ ID NO: 6367 - DNA, 17 bp, Influenza A
agagtgcaggacgttct

SEQ ID NO: 6368 - DNA, 16 bp, Influenza A
gtgaaagaccggagcc

SEQ ID NO: 6369 - DNA, 21 bp, Influenza A
ctggaaatggaaataatccca

SEQ ID NO: 6370 - DNA, 20 bp, Influenza A
gatgttaagggttttgcacc

SEQ ID NO: 6371 - DNA, 18 bp, Influenza A
tggttctccctggaaatg

SEQ ID NO: 6372 - DNA, 19 bp, Influenza A
ggtcagtatccttagggtt

SEQ ID NO: 6373 - DNA, 19 bp, Influenza A
tggaaataatgggagttgc

SEQ ID NO: 6374 - DNA, 22 bp, Influenza A
tagtccttaatattcttctgca

SEQ ID NO: 6375 - DNA, 18 bp, Influenza A
tccctggaaatggaaaca

SEQ ID NO: 6376 - DNA, 19 bp, Influenza A
atgttagttctccctggaa

SEQ ID NO: 6377 - DNA, 15 bp, Influenza A
aaagaccggagcccc

SEQ ID NO: 6378 - DNA, 16 bp, Influenza A
acagagtgcaggacgt

SEQ ID NO: 6379 - DNA, 17 bp, Influenza A
cgctaagggttttgcac

SEQ ID NO: 6380 - DNA, 19 bp, Influenza A
ttactcaaggctccctact

SEQ ID NO: 6381 - DNA, 17 bp, Influenza A
gaccggagcccctatag

SEQ ID NO: 6382 - DNA, 18 bp, Influenza A
acagtaaaagaccggagc

SEQ ID NO: 6383 - DNA, 22 bp, Influenza A
ataatggaatacgaattggatc

SEQ ID NO: 6384 - DNA, 18 bp, Influenza A
taatgggagctgcaatga

SEQ ID NO: 6385 - DNA, 22 bp, Influenza A
tcattgagtacatagaaagacc

SEQ ID NO: 6386 - DNA, 22 bp, Influenza A
attacaataacggtgttagttc

SEQ ID NO: 6387 - DNA, 17 bp, Influenza A
ttgtttcttgctcgcca

SEQ ID NO: 6388 - DNA, 19 bp, Influenza A
tattggttctccctggaaa

SEQ ID NO: 6389 - DNA, 18 bp, Influenza A
gaccggagcccttataga

SEQ ID NO: 6390 - DNA, 19 bp, Influenza A
acggaaataatgggagttg

SEQ ID NO: 6391 - DNA, 19 bp, Influenza A
ttgtttcttgctctccaac

SEQ ID NO: 6392 - DNA, 18 bp, Influenza A
gtgatgcgaagggttttg

SEQ ID NO: 6393 - DNA, 21 bp, Influenza A
aatggaatacgaattggatca

SEQ ID NO: 6394 - DNA, 25 bp, Influenza A
tacacataattagcattacaataac

SEQ ID NO: 6395 - DNA, 23 bp, Influenza A
tacaataacagtattggttctcc

SEQ ID NO: 6396 - DNA, 22 bp, Influenza A
atataggactttcatgagtgtc

SEQ ID NO: 6397 - DNA, 22 bp, Influenza A
attcttctgcatatagttagca

SEQ ID NO: 6398 - DNA, 21 bp, Influenza A
cagtaaggattgagaaggtaa

SEQ ID NO: 6399 - DNA, 23 bp, Influenza A
cataagagagtacaatgaaacag

SEQ ID NO: 6400 - DNA, 17 bp, Influenza A
ccaacagagtgcaggac

SEQ ID NO: 6401 - DNA, 22 bp, Influenza A
agataatggaatacgaattggg

SEQ ID NO: 6402 - DNA, 22 bp, Influenza A
atcataagggagtacaatgaaa

SEQ ID NO: 6403 - DNA, 21 bp, Influenza A
gggtcatgttttcgttataag

SEQ ID NO: 6404 - DNA, 25 bp, Influenza A
agaattactcaatggtataatacta

SEQ ID NO: 6405 - DNA, 21 bp, Influenza A
ggccatgtttttgtaataaga

SEQ ID NO: 6406 - DNA, 26 bp, Influenza A
gaattactcaatggtataatactagt

SEQ ID NO: 6407 - DNA, 18 bp, Influenza A
ttgtttcttgttcgccaa

SEQ ID NO: 6408 - DNA, 18 bp, Influenza A
gctgcaatgagacagtca

SEQ ID NO: 6409 - DNA, 18 bp, Influenza A
agatcggagcccctatag

SEQ ID NO: 6410 - DNA, 22 bp, Influenza A
tccatataggactttgatgagt

SEQ ID NO: 6411 - DNA, 22 bp, Influenza A
catataggactttgatgagtgt

SEQ ID NO: 6412 - DNA, 18 bp, Influenza A
ccattgtgtgatgccaag

SEQ ID NO: 6413 - DNA, 19 bp, Influenza A
aatgggagttgcaatgaaa

SEQ ID NO: 6414 - DNA, 23 bp, Influenza A
tcaaatgaatactacatgaacaa

SEQ ID NO: 6415 - DNA, 19 bp, Influenza A
atgggagttgcaatgaaac

SEQ ID NO: 6416 - DNA, 17 bp, Influenza A
gcaggacgttcttcctt

SEQ ID NO: 6417 - DNA, 20 bp, Influenza A
caatggaacagtcattaggg

SEQ ID NO: 6418 - DNA, 26 bp, Influenza A
tggtataatactaatataatcgagta

SEQ ID NO: 6419 - DNA, 21 bp, Influenza A
ccatataggactttgatgagt

SEQ ID NO: 6420 - DNA, 24 bp, Influenza A
agaaagaattactcaatggtataa

SEQ ID NO: 6421 - DNA, 21 bp, Influenza A
gaaccttttgtttcatgttcg

SEQ ID NO: 6422 - DNA, 18 bp, Influenza A
gcattgtgtgatgccaag

SEQ ID NO: 6423 - DNA, 23 bp, Influenza A
gcatcatagtaacagtattagtc

SEQ ID NO: 6424 - DNA, 24 bp, Influenza A
atagaaagaattactcaatggtat

SEQ ID NO: 6425 - DNA, 23 bp, Influenza A
catcatagtaacagtattagtcc

SEQ ID NO: 6426 - DNA, 24 bp, Influenza A
tggtataatactaatacaatcgag

SEQ ID NO: 6427 - DNA, 19 bp, Influenza A
gcaggacgttcttcattac

SEQ ID NO: 6428 - DNA, 18 bp, Influenza A
tgagaaggtaacacagcg

SEQ ID NO: 6429 - DNA, 18 bp, Influenza A
tagagaggccagagagtg

SEQ ID NO: 6430 - DNA, 24 bp, Influenza A
atgtagttagcattatagtaacag

SEQ ID NO: 6431 - DNA, 23 bp, Influenza A
accttcaaatgaatattacatga

SEQ ID NO: 6432 - DNA, 21 bp, Influenza A
ccatgtagtcagcattatagt

SEQ ID NO: 6433 - DNA, 20 bp, Influenza A
ctaatcctcaacgtcattct

SEQ ID NO: 6434 - DNA, 19 bp, Influenza A
gtcattctccatgtggtca

SEQ ID NO: 6435 - DNA, 20 bp, Influenza A
cacagggctcattacttaat

SEQ ID NO: 6436 - DNA, 19 bp, Influenza A
acctttttcctcacacagg

SEQ ID NO: 6437 - DNA, 24 bp, Influenza A
gaaccttcaaatgaatactatatg

SEQ ID NO: 6438 - DNA, 22 bp, Influenza A
tgaaacagtaagagtagaaaga

SEQ ID NO: 6439 - DNA, 23 bp, Influenza A
atatagagaaaccagagagtaat

SEQ ID NO: 6440 - DNA, 20 bp, Influenza A
taatgagtgtcgaagtaggg

SEQ ID NO: 6441 - DNA, 20 bp, Influenza A
aatagcaattggatctgcat

SEQ ID NO: 6442 - DNA, 20 bp, Influenza A
gtcattctccatgtagtcag

SEQ ID NO: 6443 - DNA, 22 bp, Influenza A
tccatatcattaggattggttg

SEQ ID NO: 6444 - DNA, 18 bp, Influenza A
cagtgaaggaccgaagtc

SEQ ID NO: 6445 - DNA, 21 bp, Influenza A
aagcaatatgtgatgtcaagg

SEQ ID NO: 6446 - DNA, 18 bp, Influenza A
tcctcaacgtcattctcc

SEQ ID NO: 6447 - DNA, 21 bp, Influenza A
caaaactttcttcctcactca

SEQ ID NO: 6448 - DNA, 18 bp, Influenza A
acagtgaaggaccgaagt

SEQ ID NO: 6449 - DNA, 19 bp, Influenza A
caggggacatgtttttgtt

SEQ ID NO: 6450 - DNA, 21 bp, Influenza A
catagagagaccttcaaatga

SEQ ID NO: 6451 - DNA, 21 bp, Influenza A
aatactacatgaacaacaccg

SEQ ID NO: 6452 - DNA, 22 bp, Influenza A
caaatggaacagtgaaagatag

SEQ ID NO: 6453 - DNA, 19 bp, Influenza A
ttttgtttcatgttcgccg

SEQ ID NO: 6454 - DNA, 19 bp, Influenza A
cgtcattctccatgtagtc

SEQ ID NO: 6455 - DNA, 20 bp, Influenza A
agaagcaatatgtgatgtca

SEQ ID NO: 6456 - DNA, 17 bp, Influenza A
aatgggagctgcaatga

SEQ ID NO: 6457 - DNA, 25 bp, Influenza A
tatccaatggtataatacaaataca

SEQ ID NO: 6458 - DNA, 20 bp, Influenza A
aaacagtgaggattgaaagg

SEQ ID NO: 6459 - DNA, 22 bp, Influenza A
aaacagtaagagtagaaagagt

SEQ ID NO: 6460 - DNA, 20 bp, Influenza A
ttgatgagtgtcaaagtagg

SEQ ID NO: 6461 - DNA, 18 bp, Influenza A
tgtgatgtcaagggcttt

SEQ ID NO: 6462 - DNA, 18 bp, Influenza A
gtgatgtcaagggctttg

SEQ ID NO: 6463 - DNA, 20 bp, Influenza A
attgggattggttgtattca

SEQ ID NO: 6464 - DNA, 23 bp, Influenza A
atgaataacacagaagcaatatg

SEQ ID NO: 6465 - DNA, 20 bp, Influenza A
ataacagtcttggttctccc

SEQ ID NO: 6466 - DNA, 20 bp, Influenza A
gtgagcatcatagtaacagt

SEQ ID NO: 6467 - DNA, 21 bp, Influenza A
aatggaacagtgaaagataga

SEQ ID NO: 6468 - DNA, 18 bp, Influenza A
gggagttgcaatgagaca

SEQ ID NO: 6469 - DNA, 20 bp, Influenza A
ctccatatcattgggattgg

SEQ ID NO: 6470 - DNA, 23 bp, Influenza A
tagaatagagaaggtaactcaat

SEQ ID NO: 6471 - DNA, 16 bp, Influenza A
tcttgctcgccaacag

SEQ ID NO: 6472 - DNA, 20 bp, Influenza A
tcattctccatgtagtcagc

SEQ ID NO: 6473 - DNA, 19 bp, Influenza A
atctgcatcattagggctt

SEQ ID NO: 6474 - DNA, 21 bp, Influenza A
atgaaacagtgagagtagaaa

SEQ ID NO: 6475 - DNA, 19 bp, Influenza A
ctacatgaacaacaccgaa

SEQ ID NO: 6476 - DNA, 19 bp, Influenza A
cttttgtctcatgttcgcc

SEQ ID NO: 6477 - DNA, 19 bp, Influenza A
ccctcagaatgtagaacct

SEQ ID NO: 6478 - DNA, 22 bp, Influenza A
ttgggattggttgtatttaatg

SEQ ID NO: 6479 - DNA, 16 bp, Influenza A
tgctcgccaacagagt

SEQ ID NO: 6480 - DNA, 19 bp, Influenza A
catgtcgtgagcatcatag

SEQ ID NO: 6481 - DNA, 18 bp, Influenza A
tcgacgtcattctccatg

SEQ ID NO: 6482 - DNA, 17 bp, Influenza A
ttctcacacagggctca

SEQ ID NO: 6483 - DNA, 18 bp, Influenza A
ttcgtttcttgttcgccc

SEQ ID NO: 6484 - DNA, 19 bp, Influenza A
ctgtgttagttctccctgg

SEQ ID NO: 6485 - DNA, 17 bp, Influenza A
tttcctcacacagggct

SEQ ID NO: 6486 - DNA, 18 bp, Influenza A
tgtcgtgagcatcatagt

SEQ ID NO: 6487 - DNA, 17 bp, Influenza A
cacagtgaaggaccgaa

SEQ ID NO: 6488 - DNA, 22 bp, Influenza A
tagtaacagtattagtccttgg

SEQ ID NO: 6489 - DNA, 21 bp, Influenza A
atatagggagaccttcaaatg

SEQ ID NO: 6490 - DNA, 20 bp, Influenza A
gtattcctcaacgtcattct

SEQ ID NO: 6491 - DNA, 20 bp, Influenza A
agagagaccagagaatgatc

SEQ ID NO: 6492 - DNA, 22 bp, Influenza A
gtattcaatgttctactgcatg

SEQ ID NO: 6493 - DNA, 20 bp, Influenza A
tggaaataatgagagttgca

SEQ ID NO: 6494 - DNA, 19 bp, Influenza A
gaagcaatatgtgatgcca

SEQ ID NO: 6495 - DNA, 22 bp, Influenza A
caatgagacagttaggatagag

SEQ ID NO: 6496 - DNA, 18 bp, Influenza A
aacgggacgatcataagg

SEQ ID NO: 6497 - DNA, 19 bp, Influenza A
aaccattggctccatatca

SEQ ID NO: 6498 - DNA, 19 bp, Influenza A
accattggctccatatcat

SEQ ID NO: 6499 - DNA, 18 bp, Influenza A
ctccaaggacaatgggat

SEQ ID NO: 6500 - DNA, 19 bp, Influenza A
gggaatacaacgagacagt

SEQ ID NO: 6501 - DNA, 23 bp, Influenza A
cattaggaatactaatcctcaac

SEQ ID NO: 6502 - DNA, 19 bp, Influenza A
atgggagatgcaatgagac

SEQ ID NO: 6503 - DNA, 19 bp, Influenza A
caacgggacaatcataagg

SEQ ID NO: 6504 - DNA, 19 bp, Influenza A
accattggctccatatcac

SEQ ID NO: 6505 - DNA, 19 bp, Influenza A
aacaatggaacaggtctga

SEQ ID NO: 6506 - DNA, 20 bp, Influenza A
gacagtagtgagggaataca

SEQ ID NO: 6507 - DNA, 18 bp, Influenza A
tcatgttcgcccttagaa

SEQ ID NO: 6508 - DNA, 21 bp, Influenza A
aatattacatgaacaacaccg

SEQ ID NO: 6509 - DNA, 21 bp, Influenza A
tcaggatagagaaggtaactc

SEQ ID NO: 6510 - DNA, 20 bp, Influenza A
agacagtagtgagggaatac

SEQ ID NO: 6511 - DNA, 21 bp, Influenza A
ctcaataacaatggaacaggt

SEQ ID NO: 6512 - DNA, 18 bp, Influenza A
tgggagttgcaatggaac

SEQ ID NO: 6513 - DNA, 18 bp, Influenza A
ttcctcactcagggttcc

SEQ ID NO: 6514 - DNA, 18 bp, Influenza A
tctaacggcacagtgaag

SEQ ID NO: 6515 - DNA, 21 bp, Influenza A
agcatcatagtaacggtattg

SEQ ID NO: 6516 - DNA, 18 bp, Influenza A
tctactgcatgtcgtgag

SEQ ID NO: 6517 - DNA, 21 bp, Influenza A
aatcataagggagtacaatgg

SEQ ID NO: 6518 - DNA, 17 bp, Influenza A
gtcgagaggccatgttt

SEQ ID NO: 6519 - DNA, 17 bp, Influenza A
tgtgtgatgccaagggg

SEQ ID NO: 6520 - DNA, 16 bp, Influenza A
ggcacagtgaaggacc

SEQ ID NO: 6521 - DNA, 16 bp, Influenza A
caagggctttgcacct

SEQ ID NO: 6522 - DNA, 19 bp, Influenza A
cttttgtttcttgttcgcc

SEQ ID NO: 6523 - DNA, 16 bp, Influenza A
acggcacagtgaagga

SEQ ID NO: 6524 - DNA, 26 bp, Influenza A
taatacaaatacaattgagtacatag

SEQ ID NO: 6525 - DNA, 19 bp, Influenza A
tggaacagtgaaggatagg

SEQ ID NO: 6526 - DNA, 21 bp, Influenza A
ttgggaatactaatcctcaac

SEQ ID NO: 6527 - DNA, 18 bp, Influenza A
gaacaacaccgaaccact

SEQ ID NO: 6528 - DNA, 16 bp, Influenza A
tgtgatgccaagggct

SEQ ID NO: 6529 - DNA, 18 bp, Influenza A
aacactggaacaggtctg

SEQ ID NO: 6530 - DNA, 19 bp, Influenza A
atagaagcccattcaggac

SEQ ID NO: 6531 - DNA, 19 bp, Influenza A
ggccatatcattgggattg

SEQ ID NO: 6532 - DNA, 20 bp, Influenza A
atagtgagggaatacaacga

SEQ ID NO: 6533 - DNA, 21 bp, Influenza A
gttgtattcaatgtcctactg

SEQ ID NO: 6534 - DNA, 18 bp, Influenza A
acaggtctgaactgcaac

SEQ ID NO: 6535 - DNA, 17 bp, Influenza A
tgcatgtcgtgagcatc

SEQ ID NO: 6536 - DNA, 17 bp, Influenza A
gatgtcaagggctttgc

SEQ ID NO: 6537 - DNA, 17 bp, Influenza A
aacaacaccgaaccact

SEQ ID NO: 6538 - DNA, 17 bp, Influenza A
taacggcacagtgaagg

SEQ ID NO: 6539 - DNA, 18 bp, Influenza A
caacaccgaaccactttg

SEQ ID NO: 6540 - DNA, 23 bp, Influenza A
tcagaatagagaagataactcaa

SEQ ID NO: 6541 - DNA, 17 bp, Influenza A
tgcacctttctccaagg

SEQ ID NO: 6542 - DNA, 18 bp, Influenza A
gaagcccattcaggactc

SEQ ID NO: 6543 - DNA, 16 bp, Influenza A
tgcaacgggacgatca

SEQ ID NO: 6544 - DNA, 18 bp, Influenza A
cgccctcagaatgtagaa

SEQ ID NO: 6545 - DNA, 21 bp, Influenza A
aatactagtgtggtcgaatac

SEQ ID NO: 6546 - DNA, 17 bp, Influenza A
ctcatgttcgccctcag

SEQ ID NO: 6547 - DNA, 21 bp, Influenza A
atactagtgtggtcgaatacg

SEQ ID NO: 6548 - DNA, 22 bp, Influenza A
atgttcaccattagaatgtaga

SEQ ID NO: 6549 - DNA, 20 bp, Influenza A
cagtattagtccttgggaga

SEQ ID NO: 6550 - DNA, 18 bp, Influenza A
tggaatgagggcacttac

SEQ ID NO: 6551 - DNA, 21 bp, Influenza A
gacagtagtgagagaatacaa

SEQ ID NO: 6552 - DNA, 21 bp, Influenza A
tgtatcattagggcttgtaat

SEQ ID NO: 6553 - DNA, 19 bp, Influenza A
ttggaatgaaggcactttc

SEQ ID NO: 6554 - DNA, 21 bp, Influenza A
ttaggatagagaaggtgactc

SEQ ID NO: 6555 - DNA, 17 bp, Influenza A
tcgtctcttgttcgccc

SEQ ID NO: 6556 - DNA, 17 bp, Influenza A
gtctcttgttcgcccac

SEQ ID NO: 6557 - DNA, 18 bp, Influenza A
cgaaccactttgtgaggc

SEQ ID NO: 6558 - DNA, 20 bp, Influenza A
attgagtatctagagaggcc

SEQ ID NO: 6559 - DNA, 23 bp, Influenza A
agtatatagaggaaccttcaaat

SEQ ID NO: 6560 - DNA, 17 bp, Influenza A
tccttgggagaggtggc

SEQ ID NO: 6561 - DNA, 18 bp, Influenza A
gtgccgtattggaatggg

SEQ ID NO: 6562 - DNA, 21 bp, Influenza A
tcagaagattctatgcacttc

SEQ ID NO: 6563 - DNA, 20 bp, Influenza A
aataggcacaattgcagtac

SEQ ID NO: 6564 - DNA, 22 bp, Influenza A
cgaacttaggattgaacatagg

SEQ ID NO: 6565 - DNA, 22 bp, Influenza A
cgaacttaggattgaacatagt

SEQ ID NO: 6566 - DNA, 20 bp, Influenza A
aatgcaagccaaacaataat

SEQ ID NO: 6567 - DNA, 22 bp, Influenza A
caaacatcacccaaataagtaa

SEQ ID NO: 6568 - DNA, 21 bp, Influenza A
acaaacatcacccaaataagt

SEQ ID NO: 6569 - DNA, 21 bp, Influenza A
cactataaattcatggcacat

SEQ ID NO: 6570 - DNA, 20 bp, Influenza A
aatgcaagccaaacaataca

SEQ ID NO: 6571 - DNA, 22 bp, Influenza A
ggctctgtactataaattcatg

SEQ ID NO: 6572 - DNA, 18 bp, Influenza A
gaagcaaccaatgcaagc

SEQ ID NO: 6573 - DNA, 22 bp, Influenza A
acatcacccaaataagtaatac

SEQ ID NO: 6574 - DNA, 20 bp, Influenza A
gagttaatacgtgggagacc

SEQ ID NO: 6575 - DNA, 18 bp, Influenza A
ctatgcacttctgccact

SEQ ID NO: 6576 - DNA, 23 bp, Influenza A
attgaatataggactacatctga

SEQ ID NO: 6577 - DNA, 26 bp, Influenza A
taataaacaactactataatgagaca

SEQ ID NO: 6578 - DNA, 22 bp, Influenza A
taataggaatagcgaacttagg

SEQ ID NO: 6579 - DNA, 20 bp, Influenza A
agatgaatgcaggttctatg

SEQ ID NO: 6580 - DNA, 20 bp, Influenza A
cagagggaaacactcaaatg

SEQ ID NO: 6581 - DNA, 18 bp, Influenza A
tgctctcgtaataggcac

SEQ ID NO: 6582 - DNA, 21 bp, Influenza A
agggctctgtactataaattc

SEQ ID NO: 6583 - DNA, 18 bp, Influenza A
gcaggttctatgctctca

SEQ ID NO: 6584 - DNA, 18 bp, Influenza A
gactattgggctgagggg

SEQ ID NO: 6585 - DNA, 22 bp, Influenza A
cataggaatagtgaacttagga

SEQ ID NO: 6586 - DNA, 20 bp, Influenza A
caaacatcacccagataagt

SEQ ID NO: 6587 - DNA, 22 bp, Influenza A
atcacccagataagtaatacca

SEQ ID NO: 6588 - DNA, 19 bp, Influenza A
agatgagtgcaggttctat

SEQ ID NO: 6589 - DNA, 20 bp, Influenza A
agacaatgcggtaagaattg

SEQ ID NO: 6590 - DNA, 18 bp, Influenza A
aataggcacgattgcagt

SEQ ID NO: 6591 - DNA, 19 bp, Influenza A
ctatgcacttctgctactg

SEQ ID NO: 6592 - DNA, 20 bp, Influenza A
cagtatacaacagcaaggta

SEQ ID NO: 6593 - DNA, 18 bp, Influenza A
gctcatggactattgggc

SEQ ID NO: 6594 - DNA, 18 bp, Influenza A
ggttctatgctctcagcc

SEQ ID NO: 6595 - DNA, 18 bp, Influenza A
aggttctatgctctcagc

SEQ ID NO: 6596 - DNA, 21 bp, Influenza A
ttaactaaagggctctgtact

SEQ ID NO: 6597 - DNA, 27 bp, Influenza A
taataaacaactactataataagacaa

SEQ ID NO: 6598 - DNA, 18 bp, Influenza A
atgggaaagacaatgcgg

SEQ ID NO: 6599 - DNA, 18 bp, Influenza A
gacacaaacatcacccag

SEQ ID NO: 6600 - DNA, 21 bp, Influenza A
aatgcagtaagaattggagag

SEQ ID NO: 6601 - DNA, 20 bp, Influenza A
ttgaacataggactacacct

SEQ ID NO: 6602 - DNA, 21 bp, Influenza A
cagatgttttagtcacaagag

SEQ ID NO: 6603 - DNA, 21 bp, Influenza A
gactacatctgaaaccaaact

SEQ ID NO: 6604 - DNA, 18 bp, Influenza A
accaaagggctctgtact

SEQ ID NO: 6605 - DNA, 16 bp, Influenza A
tctgccactgctctcg

SEQ ID NO: 6606 - DNA, 21 bp, Influenza A
gaattggagagaactcagatg

SEQ ID NO: 6607 - DNA, 18 bp, Influenza A
gaccaaagggctctgtac

SEQ ID NO: 6608 - DNA, 18 bp, Influenza A
cactatcatcaccaccca

SEQ ID NO: 6609 - DNA, 17 bp, Influenza A
cagtgggtccttcatgg

SEQ ID NO: 6610 - DNA, 19 bp, Influenza A
aacaatacacgacaggtcc

SEQ ID NO: 6611 - DNA, 18 bp, Influenza A
gactacacctgaaaccga

SEQ ID NO: 6612 - DNA, 19 bp, Influenza A
aatgcggtaagaattggag

SEQ ID NO: 6613 - DNA, 16 bp, Influenza A
tattgggctgaggggg

SEQ ID NO: 6614 - DNA, 20 bp, Influenza A
taacaccaacatccaaatgg

SEQ ID NO: 6615 - DNA, 18 bp, Influenza A
tgcggtaagaattggaga

SEQ ID NO: 6616 - DNA, 18 bp, Influenza A
acaacgatcagagggaaa

SEQ ID NO: 6617 - DNA, 18 bp, Influenza A
acgaaacaaacatcaccc

SEQ ID NO: 6618 - DNA, 17 bp, Influenza A
cagtatcgcgccctaat

SEQ ID NO: 6619 - DNA, 22 bp, Influenza A
agagaattcaataacttgacca

SEQ ID NO: 6620 - DNA, 19 bp, Influenza A
ggtaagtccaggatgtcaa

SEQ ID NO: 6621 - DNA, 17 bp, Influenza A
gctcacactcacaacct

SEQ ID NO: 6622 - DNA, 20 bp, Influenza A
ggtcagacaatcgtcttaaa

SEQ ID NO: 6623 - DNA, 18 bp, Influenza A
ctatgtttcatgcgaccc

SEQ ID NO: 6624 - DNA, 15 bp, Influenza A
ccagtatcgcgccct

SEQ ID NO: 6625 - DNA, 18 bp, Influenza A
cctatgtctcctgtgacc

SEQ ID NO: 6626 - DNA, 17 bp, Influenza A
gctctaagccaagggac

SEQ ID NO: 6627 - DNA, 17 bp, Influenza A
cgccctaataagctggc

SEQ ID NO: 6628 - DNA, 19 bp, Influenza A
gtaagaattggggaggact

SEQ ID NO: 6629 - DNA, 18 bp, Influenza A
ctgtgacccagatgagtg

SEQ ID NO: 6630 - DNA, 19 bp, Influenza A
acaactcaaggtcagacaa

SEQ ID NO: 6631 - DNA, 19 bp, Influenza A
ctgtgatccagatgagtgc

SEQ ID NO: 6632 - DNA, 16 bp, Influenza A
tgctctcagccaaggg

SEQ ID NO: 6633 - DNA, 16 bp, Influenza A
gctctcagccaaggga

SEQ ID NO: 6634 - DNA, 16 bp, Influenza A
tgctctcagccaagga

SEQ ID NO: 6635 - DNA, 17 bp, Influenza A
ctctcagccaagggaca

SEQ ID NO: 6636 - DNA, 22 bp, Influenza A
gtagagaattcaataacctgac

SEQ ID NO: 6637 - DNA, 21 bp, Influenza A
actcagatgttctagtaacga

SEQ ID NO: 6638 - DNA, 21 bp, Influenza A
ctcagatgttctagtaacgag

SEQ ID NO: 6639 - DNA, 21 bp, Influenza A
aaaggcaagtagagaattcaa

SEQ ID NO: 6640 - DNA, 17 bp, Influenza A
tggggaggactcagatg

SEQ ID NO: 6641 - DNA, 17 bp, Influenza A
tgacccagatgagtgca

SEQ ID NO: 6642 - DNA, 17 bp, Influenza A
gtctcctgtgacccaga

SEQ ID NO: 6643 - DNA, 17 bp, Influenza A
ttgaccaaagggctctg

SEQ ID NO: 6644 - DNA, 19 bp, Influenza A
acttgaccaaaggactctg

SEQ ID NO: 6645 - DNA, 19 bp, Influenza A
caatacacgacagatccca

SEQ ID NO: 6646 - DNA, 20 bp, Influenza A
ctgctattgtaataggcaca

SEQ ID NO: 6647 - DNA, 17 bp, Influenza A
cacaacccgaagcaacc

SEQ ID NO: 6648 - DNA, 17 bp, Influenza A
tctgccactgctatcgt

SEQ ID NO: 6649 - DNA, 20 bp, Influenza A
taccaacatccaagtagagg

SEQ ID NO: 6650 - DNA, 19 bp, Influenza A
tggaggaaaaggcaagtag

SEQ ID NO: 6651 - DNA, 19 bp, Influenza A
caagtagaggagagagcaa

SEQ ID NO: 6652 - DNA, 18 bp, Influenza A
tctcaatatcgtgccctg

SEQ ID NO: 6653 - DNA, 19 bp, Influenza A
ctctaagtcaaagcccact

SEQ ID NO: 6654 - DNA, 19 bp, Influenza A
gccaaggaacaacgattag

SEQ ID NO: 6655 - DNA, 17 bp, Influenza A
ctgcaactgctcacact

SEQ ID NO: 6656 - DNA, 18 bp, Influenza A
gaaaccagactgcaactg

SEQ ID NO: 6657 - DNA, 21 bp, Influenza A
ttgaacatagtggttacagtg

SEQ ID NO: 6658 - DNA, 21 bp, Influenza A
aaggactctgcactataaatt

SEQ ID NO: 6659 - DNA, 19 bp, Influenza A
ctcacactggactattggg

SEQ ID NO: 6660 - DNA, 18 bp, Influenza A
ctattcgcttctgccact

SEQ ID NO: 6661 - DNA, 17 bp, Influenza A
ggaaggacaatgcggta

SEQ ID NO: 6662 - DNA, 19 bp, InfluenzaA
ggtgatgaactccccatat

SEQ ID NO: 6663 - DNA, 18 bp, InfluenzaA
tggtgaactccccaaatg

SEQ ID NO: 6664 - DNA, 20 bp, InfluenzaA
tccatctattgccttttgag

SEQ ID NO: 6665 - DNA, 19 bp, InfluenzaA
ccgaggagcaattagattc

SEQ ID NO: 6666 - DNA, 24 bp, InfluenzaA
ctttctctttattgtttacatagg

SEQ ID NO: 6667 - DNA, 22 bp, InfluenzaA
ataagcattttctgtatggtag

SEQ ID NO: 6668 - DNA, 18 bp, InfluenzaA
ggattctttgtctgcagc

SEQ ID NO: 6669 - DNA, 21 bp, InfluenzaA
gattccccatattatcagagc

SEQ ID NO: 6670 - DNA, 19 bp, InfluenzaA
ctttctttgtcagccagac

SEQ ID NO: 6671 - DNA, 20 bp, InfluenzaA
gcactccccaaattattagc

SEQ ID NO: 6672 - DNA, 19 bp, InfluenzaA
gcagcattgtctttgtttg

SEQ ID NO: 6673 - DNA, 20 bp, InfluenzaA
gccatctcatactcctgtag

SEQ ID NO: 6674 - DNA, 19 bp, InfluenzaA
ggagcaattaggttccctg

SEQ ID NO: 6675 - DNA, 20 bp, InfluenzaA
gacggattgccagacactgc

SEQ ID NO: 6676 - DNA, 23 bp, InfluenzaA
gatatgtgcttcctgatttggtc

SEQ ID NO: 6677 - DNA, 19 bp, InfluenzaA
gccatctgtctccgtcagc

SEQ ID NO: 6678 - DNA, 19 bp, InfluenzaA
tgtattgggcgtcttgaac

SEQ ID NO: 6679 - DNA, 20 bp, InfluenzaA
ggaagacctaccaaggtatg

SEQ ID NO: 6680 - DNA, 22 bp, InfluenzaA
caaccagttcagtctactgaag

SEQ ID NO: 6681 - DNA, 21 bp, InfluenzaA
gtcagccatagcaaatttctg

SEQ ID NO: 6682 - DNA, 20 bp, InfluenzaA
gccaattcagtcggctaaag

SEQ ID NO: 6683 - DNA, 19 bp, InfluenzaA
gcttctgtccttaacggtc

SEQ ID NO: 6684 - DNA, 22 bp, InfluenzaA
ggattctatcatgtattgtgtc

SEQ ID NO: 6685 - DNA, 20 bp, InfluenzaA
tgaccatccaacacatatga

SEQ ID NO: 6686 - DNA, 19 bp, InfluenzaA
gtacacattgggtgattgc

SEQ ID NO: 6687 - DNA, 21 bp, InfluenzaA
catgatttaatggagtctgtc

SEQ ID NO: 6688 - DNA, 20 bp, InfluenzaA
gaccatccaacacattctac

SEQ ID NO: 6689 - DNA, 19 bp, InfluenzaA
gcacattcagactcttgtg

SEQ ID NO: 6690 - DNA, 21 bp, InfluenzaA
cattcagactcttgagttctc

SEQ ID NO: 6691 - DNA, 22 bp, InfluenzaA
tccatcagtcattacagtaaag

SEQ ID NO: 6692 - DNA, 20 bp, InfluenzaA
cttggtccatcagtcattac

SEQ ID NO: 6693 - DNA, 19 bp, InfluenzaA
tttccatcatggcaacttg

SEQ ID NO: 6694 - DNA, 18 bp, InfluenzaA
ctttcccatcatggcaac

SEQ ID NO: 6695 - DNA, 21 bp, InfluenzaA
cattgatacaaacacattccg

SEQ ID NO: 6696 - DNA, 20 bp, InfluenzaA
gaactcactgttgctcactg

SEQ ID NO: 6697 - DNA, 20 bp, InfluenzaA
ctgaccaagcaactgattcg

SEQ ID NO: 6698 - DNA, 19 bp, InfluenzaA
gagctggaccatgctatgc

SEQ ID NO: 6699 - DNA, 19 bp, InfluenzaA
atggcaagcagttgctgac

SEQ ID NO: 6700 - DNA, 40 bp, InfluenzaA
tggtcactgtccgtrctcgggtggtgaaccccccaaatgt

SEQ ID NO: 6701 - DNA, 40 bp, InfluenzaA
ccctttggtcccctatgttagrcgggtgatgaacacccca

SEQ ID NO: 6702 - DNA, 40 bp, InfluenzaA
aatttgatcctttctttgtcagccagaccatgttcctgaa

SEQ ID NO: 6703 - DNA, 40 bp, InfluenzaA
agctcctctttattgttgggtatgmactgttctttttgat

SEQ ID NO: 6704 - DNA, 40 bp, InfluenzaA
ttccctgtgctgttaatcaraagtatgtctcccggtttta

SEQ ID NO: 6705 - DNA, 40 bp, InfluenzaA
atgytcttycctctattatttgtgtattgggcgtcttgaa

SEQ ID NO: 6706 - DNA, 40 bp, InfluenzaA
attgttaacataggatttgctgagctttgggtatgaattt

SEQ ID NO: 6707 - DNA, 40 bp, InfluenzaA
cgtctaccattccctcccaaccattttctatgaaacctgc

SEQ ID NO: 6708 - DNA, 40 bp, InfluenzaA
gtctgctgcataccctgatccctggtcattgctgtgatgg

SEQ ID NO: 6709 - DNA, 40 bp, InfluenzaA
cttgtttgtaatyccgttaatggcattttgtgtgcttttt

SEQ ID NO: 6710 - DNA, 40 bp, InfluenzaA
tgatagatccccattgattccaatttcactccatctacct

SEQ ID NO: 6711 - DNA, 40 bp, InfluenzaA
gcatcgggtatgtgttacctgatttgtacaaccagttcag

SEQ ID NO: 6712 - DNA, 40 bp, InfluenzaA
ttttcagctttgggtmtgagccctccttctccgtcagcca

SEQ ID NO: 6713 - DNA, 40 bp, InfluenzaA
gtaggcggatgatgaacaccccatagcacaaggacttctt

SEQ ID NO: 6714 - DNA, 40 bp, InfluenzaA
acctgaacatgctctgcttgttccagtgtaagtcacattc

SEQ ID NO: 6715 - DNA, 40 bp, InfluenzaA
tgaatggatgggatgttccttagtcctgtaaccatcctta

SEQ ID NO: 6716 - DNA, 40 bp, InfluenzaA
tagaaacaagggtgtttttaattactaatacactcaaatg

SEQ ID NO: 6717 - DNA, 40 bp, InfluenzaA
tatgtctcccggttttactattgtccaatagatgcttatt

SEQ ID NO: 6718 - DNA, 40 bp, InfluenzaA
catcattrggatggtgcacyccccaaattattagcatttg

SEQ ID NO: 6719 - DNA, 40 bp, InfluenzaA
agtatgtctcccggttttactattgtccaatagatgctta

SEQ ID NO: 6720 - DNA, 40 bp, InfluenzaA
ctttttgataagccataccacatttctgaaaaaggaggac

SEQ ID NO: 6721 - DNA, 40 bp, InfluenzaA
gattttcccctcctcaatgaatagtattttagtatcagct

SEQ ID NO: 6722 - DNA, 40 bp, InfluenzaA
acacatctgacaccaggatatcgaggataacaggagcact

SEQ ID NO: 6723 - DNA, 40 bp, InfluenzaA
attgagatwatattccctatttgcaatattaggctaatta

SEQ ID NO: 6724 - DNA, 40 bp, InfluenzaA
gartggctwayccatattgagataatattccctatttgca

SEQ ID NO: 6725 - DNA, 40 bp, InfluenzaA
gcaatgtyacagtagttacyarcatggcaatctgcatgag

SEQ ID NO: 6726 - DNA, 40 bp, InfluenzaA
cagccatgcttttccatcgtgacaacttgagctggaccat

SEQ ID NO: 6727 - DNA, 40 bp, InfluenzaA
ctatctctgttatgtttctttctattattattggttcaca

SEQ ID NO: 6728 - DNA, 40 bp, InfluenzaA
ttgaaatgcaatgttacagtagttaccagcatggcaatct

SEQ ID NO: 6729 - DNA, 40 bp, InfluenzaA
gccactgctccattrtctggaccagaaattccgattgtta

SEQ ID NO: 6730 - DNA, 40 bp, InfluenzaA
catggcaagcacttgctgaccaagcaacagactcaaacct

SEQ ID NO: 6731 - DNA, 40 bp, InfluenzaA
tttcatcatgcccagtkacacaaacatgcagccatgcttt

SEQ ID NO: 6732 - DNA, 31 bp, Artificial
  Combination T7 and universal influenza A forward primer for cDNA
taatacgactcactataggagcaaaagcagg

SEQ ID NO: 6733 - DNA, 25 bp, Artificial
  T7 forward primer for PCR
gcatcctaatacgactcactatagg

SEQ ID NO: 6734 - DNA, 15 bp, Artificial
  Univeral forward Primer having linker and influenza A sequence
aggagcaaaagcagg

SEQ ID NO: 6735 - DNA, 15 bp, Artificial
  Universal Reverse Primer having linker and influenza A sequence
ggagtagaaacaagg

SEQ ID NO: 6736 - DNA, 17 bp, Artificial
  Universal HA forward primer having linker and influenza sequence
aggagcaaaagcagggg

SEQ ID NO: 6737 - DNA, 20 bp, Influenza A
agtagaaacaagggtgtttt

SEQ ID NO: 6738 - DNA, 18 bp, Artificial
  Universal NA forward primer having linker and influenza A sequence
aggagcaaaagcaggact

SEQ ID NO: 6739 - DNA, 21 bp, Influenza A
agtagaaacaaggagtttttt

What is claimed is:

1. A microarray device for genetic identification of upper respiratory pathogens comprising: a plurality of oligonucleotide probe sequences, wherein the oligonucleotide probe sequences correspond to distinct sequence regions of at least five pathogens selected from the group consisting of influenza A, influenza B, parainfluenza virus, adenovirus, enterovirus, rhinovirus, human metapneumovirus, respiratory syncytal virus, herpes simplex viruses, SARS coronavirus, Epstein-Barr virus, human herpes virus, pan bacteria, Chlamydia, Mycoplasma, streptococcus, Bacillus anthracis, Streptococcuspyogenes, Mycoplasmapneumoniae, Chlamydiapneumoniae, Bacillus thuringiensis, Bacillus subtilis, Bacillus cereus, and B. anthracis, and combinations thereof.

2. The microarray device of claim 1, wherein the oligonucleotide probe sequences for influenza A are selected from the group consisting of: SEQ ID NO:1-11, 251-261, 495-505, 726-736.

3. The microarray device of claim 1, wherein the oligonucleotide probe sequences for influenza B are selected from the group consisting of: SEQ ID NO:12-35, 262-285, 506-525, 737-758.

4. The microarray device of claim 1, wherein the oligonucleotide probe sequences for parainfluenza virus are selected from the group consisting of: SEQ ID NO:36-70, 286-315, 526-560, 759-792.

5. The microarray device of claim 1, wherein the oligonucleotide probe sequences for adenovirus are selected from the group consisting of: SEQ ID NO:71-95, 316-341, 561-582, 793-818.

6. The microarray device of claim 1, wherein the oligonucleotide probe sequences for enterovirus are selected from the group consisting of: SEQ ID NO:96-121, 342-368, 583-604, 819-842.

7. The microarray device of claim 1, wherein the oligonucleotide probe sequences for rhinovirus are selected from the group consisting of: SEQ ID NO:122-138, 369-385, 605-621, 843-859, and combinations thereof.

8. The microarray device of claim 1, wherein the oligonucleotide probe sequences for human metapneumovirus are selected from the group consisting of: SEQ ID NO:139-141, 386-388, 622-624, 860-862, and combinations thereof.

9. The microarray device of claim 1, wherein the oligonucleotide probe sequences for respiratory syncytal virus are selected from the group consisting of: SEQ ID NO:142-177, 389-425, 625-657, 863-896, and combinations thereof.

10. The microarray device of claim 1, wherein the oligonucleotide probe sequences for herpes simplex viruses are selected from the group consisting of: SEQ ID NO:178-184, 426-431, 658-665, 897-905, and combinations thereof.

11. The microarray device of claim 1, wherein the oligonucleotide probe sequences for SARS coronavirus are selected from the group consisting of: SEQ ID NO:185-202, 432-448, 666-682, 906-924, and combinations thereof.

12. The microarray device of claim 1, wherein the oligonucleotide probe sequences for Epstein-Barr virus are selected from the group consisting of: SEQ ID NO:203-204, 449, 925-927, and combinations thereof.

13. The microarray device of claim 1, wherein the oligonucleotide probe sequences for human herpes virus are selected from the group consisting of: SEQ ID NO:205-206, 450-451, 863, 928-929, and combinations thereof.

14. The microarray device of claim 1, wherein the oligonucleotide probe sequences for pan bacteria are selected from the group consisting of: SEQ ID NO:207-210, 452-454, 684-687, 930-933, and combinations thereof.

15. The microarray device of claim 1, wherein the oligonucleotide probe sequences for Chlamydia are selected from the group consisting of: SEQ ID NO:211-226, 455-470, 688-701, 934-949, and combinations thereof.

16. The microarray device of claim 1, wherein the oligonucleotide probe sequences for Mycoplasma are selected from the group consisting of: SEQ ID NO:227-238, 471-482, 702-713, 950-962, and combinations thereof.

17. The microarray device of claim 1, wherein the oligonucleotide probe sequences for streptococcus are selected from the group consisting of: SEQ ID NO:239-244, 483-488, 714-719, 963-968, and combinations thereof.

18. The microarray device of claim 1, wherein the oligonucleotide probe sequences for Bacillus anthracis are selected from the group consisting of: SEQ ID NO:245-250, 489-494, 720-725, 969-997, and combinations thereof.

19. The microarray device of claim 1, wherein the oligonucleotide probe sequences for Streptococcuspyogenes are selected from the group consisting of: SEQ ID NO:975-1013, and combinations thereof.

20. The microarray device of claim 1, wherein the oligonucleotide probe sequences for Mycoplasmapneumoniae are selected from the group consisting of: SEQ ID NO:1014-1051, and combinations thereof.

21. The microarray device of claim 1, wherein the oligonucleotide probe sequences for Chlamydiapneumoniae are selected from the group consisting of: SEQ ID NO:1052-1083, and combinations thereof.

22. The microarray device of claim 1, wherein the oligonucleotide probe sequences for Bacillus thuringiensis are selected from the group consisting of: SEQ ID NO:1084-1115, and combinations thereof.

23. The microarray device of claim 1, wherein the oligonucleotide probe sequences for Bacillus subtilis are selected from the group consisting of: SEQ ID NO:1116-1154, and combinations thereof.

24. The microarray device of claim 1, wherein the oligonucleotide probe sequences for Bacillus cereus are selected from the group consisting of: SEQ ID NO:1155-1157, and combinations thereof.

25. The microarray device of claim 1, wherein the oligonucleotide probe sequences for B. anthracis are selected from the group consisting of: SEQ ID NO:1158-1173, and combinations thereof.

26. The microarray device of claim 1, wherein the oligonucleotide probe sequences are selected from a 400 to 800 bases range corresponding to a unique gene selected from each pathogen.

27. The microarray device of claim 26, wherein the oligonucleotide probe sequences are selected from 400 to 800 bases range corresponding to the unique gene of each pathogen from a 5′ end.

28. The microarray device of claim 1, wherein the oligonucleotide probe sequences are attached to known locations by in situ electrochemical synthesis.

29. The microarray device of claim 28, wherein an electrode is associated with each of the known locations, wherein the electrodes are used to synthesize the oligonucleotide probe sequences.

30. The microarray device of claim 29, wherein the electrodes are on a solid surface having the known locations or on an opposing solid surface to the solid surface having the known locations.

31. The microarray device of claim 1, wherein the oligonucleotide probe sequences are attached to the known locations by a method selected from the group consisting of spotting, ink-jet printing, electric field deposition, and in situ photolithography synthesis.

32. A microarray device for subtyping influenza A comprising: a microarray device having a plurality of oligonucleotide probe sequences for subtypes of influenza A selected from the group consisting of at least five of Influenza A subtypes of H1, H2, H3, H4, H5, H6, H7, H8, H9, H10, H11, H12, H13, H14, H15, N1, N2, N3, N4, N5, N6, N7, N8, and N9, and combinations thereof.

33. The microarray device of claim 32, wherein the probe sequences that correspond the each subtype of influenza A as follows: H1 (SEQ ID NO:1174-1573), H2 (SEQ ID NO:1574-1973), H3 (SEQ ID NO:1975-2373), H4 (SEQ ID NO:2374-2573), H5 (SEQ ID NO:2574-2973), H6 (SEQ ID NO:2974-3369), H7 (SEQ ID NO:3370-3769), H8 (SEQ ID NO:3770-3887), H9 (SEQ ID NO:3888-4287), H10 (SEQ ID NO:4288-4390), H11 (SEQ ID NO:4391-4486), H12 (SEQ ID NO:4487-4587), H13 (SEQ ID NO:4588-4705), H14 (SEQ ID NO:4706-4761), H15 (SEQ ID NO:4762-4807), N1 (SEQ ID NO:4808-5207), N2 (SEQ ID NO:5208-5607), N3 (SEQ ID NO:5608-5878), N4 (SEQ ID NO:5879-5920), N5 (SEQ ID NO:5921-5995), N6 (SEQ ID NO:5996-6116), N7 (SEQ ID NO:6117-6216), N8 (SEQ ID NO:6217-6561), and N9 (SEQ ID NO:6562-6661).

34. The microarray device of claim 32, wherein the oligonucleotide probe sequences are selected from a 400 to 800 bases range corresponding to a unique gene selected from each pathogen.

35. The microarray device of claim 34, wherein the oligonucleotide probe sequences are selected from the 400 to 800 bases range corresponding to the unique gene from each pathogen at a 5′ end.

36. The microarray device of claim 32, wherein the oligonucleotide probe sequences are attached to known locations by in situ electrochemical synthesis.

37. The microarray device of claim 36, wherein an electrode is associated with each of the known locations, wherein the electrodes are used to synthesize the oligonucleotide probe sequences.

38. The microarray device of claim 37, wherein the electrodes are on a solid surface having the known locations or on an opposing solid surface to the solid surface having the known locations.

39. The microarray device of claim 32, wherein the oligonucleotide probe sequences are attached to the known locations by a method selected from the group consisting of spotting, ink-jet printing, electric field deposition, and in situ photolithography synthesis.

40. A pool of PCR primers for amplifying influenza A samples comprising: a PCR primer set selected from the group consisting of at least ten primer sequences from SEQ ID NO:6662-6699 and combinations thereof.

41. The pool of PCR primers of claim 40, wherein the PCR primer set is selected from a 50 to 200 bases range of HA and NA genes.

42. The pool of PCR primers of claim 40, wherein the PCR primer set is selected from a range of 450 to 700 bases from a 5′ end of HA and NA genes.

43. A pool of PCR primers for amplifying influenza A samples comprising: a PCR primer set selected from the group consisting of at least ten primer sequences from SEQ ID NO:6700-6731 and combinations thereof.

44. The pool of PCR primers of claim 43, wherein the PCR primer set is selected from a 50 to 200 bases range of HA and NA genes.

45. The pool of PCR primers of claim 43, wherein the PCR primer set is selected from range of 450 to 700 bases from a 5′ end of HA and NA genes.
